United States Patent Application Publication US 2015/0354009 A1 - sequence listing, part 13

SEQ ID NO: 326 - DNA, 148068 bp, Homo sapiens
gcatacggaggcgactcgcttccttcccgcccctccgccgcgctcttcttccttccttctccagtcccttccactgtgcgtcttctgtcccccgttcttccccagcggacccctctttcgagactccctagtggggtccccagctcccgggcgatcctgcccttgccgagcgcgttttctggagtcacctgggggaggggagtcctgggcagggccgggctggggaagacgcctggggcactgcccggcgttaacaaagggagccgataccgaccggcgtgggcgcggagcgggcggccgccaccgagcgtgctgagcaaccgcagcctccgcggccgagagtgcagcgagtgagtagggggtgcggtgggcggcggcgcggcccgggctatcccgggaggagtgtgatgcaaaggggcgcgggaggatagcggaggcgcggggcccgcggcgcgcgtagggcgcagggaatctctctccagctccgcctcagctgccttggctccggggctggccgccttttggttgggggtgtgtgcatttttgtcagggccaaagggccaccctggcttctctctggctccgcgagcctgcggatccacaacaaacccacgtgcgcacagccccggggaacacggatttctccacggcaccgtcagtatggggtggggtggcgtgggggcattgcgccttgcagagtctgggtttacggatcgacaaattgaggcccgcggcagcggagggggcacaggcaccataacaaacgcacgtgcgccctgcccggagagctggacgcactgcatacccttaggggccgccctgcggtgccgggccattgtctcagcctcgggggagggagtggctctagaggcgccacttgctggaagagggcgagagagacatttaaaaggtaccgcttgggcatcagactaaactgccagacttaaaaagggaaaccaaaacaagaaagcagctacaaaaaggttactccaggctgagtcggtccccggccgtggcgcattcttttgggtgaagtggaccacccctcaccttcacctcctggaggtctcttagagatgtgggttgggttaagggtctaagggtgcccctcaaaaaaagagagtgctgggtgcactattgtccccgcactccggcgattgcctctgtggggatattttggtcgcctcctcagcctgcgggaagaatgtacgagtcgcccagtgcggtcttgctctttgcctctgaggcccgtgtccgtgtgcccagacaccccagatgtcactagccccttttggcttgttaatgcattttcgcaagcaaggccagccgagacctcgtattctagctggggacgtacaattttcagttctgagtttatttgaaagaaattccgaggtccggaaaaagagaactcttgtttgttttgctttttctttgcttacatatgctcagctcagctttgcagatgttaatcggacacgatctgcagcggggagatggtttcgcggtgaattggtctctgaggcgatggtgttggtgcaggttgtgggcgtgcagtgtgagcaggaatggaggcgccgccgccccagtgtgtgcctgctgagcgggcgggctgctgcctcaccttggctagtgtggctgaagattaacctgtccccggggggggaactggagagcctccaatcctattccgctgttattgaaaaggtctagagagcatctagggagccttctcattttacaggcaggaagctgaggccggagagttcagccacttgtccaagtttaaaccgggtgaaacgggccacagagagaacacttgagtgtgggtctcccaactcccactgcatcgctcagcgggcaactaaaggcaaaaccgggattctgtgattggcctaaaaggcagtggccttaggcagaatagggtgaaacaaagagtaattcaaatagaaagctgcacccttccattatccctttcaagaattctttattctgttgagaaaaaatagatttagtaattccttactctccttcaagcctttcaaaagcttagttatttttctctcctggctgccccttcccctcaaattggaataaggccagctacggagactcagatgttttgcctctcatccttgtgccaggaggcctttgtttgggcaaaagcatgggctgttgacatcagccccacggggaagaaagtgtgtcttagcaagctactcctgagccacttgtgggagaacaaagcattgttttcactgatcttattaaagttactttttttttaacgagagtcccatggaagtagctgcttatttttgtatttggcagagaagtaggaaaaccaaaaaaacactgagaagccggatttccccaaagttaacatgttgttttgcactgtgcctgttatctcctagttacacttgtttcttttccttagagtttccagcgtgtttcactttcaatgtgattctggtagcaacaggaggcagctggatgcctaggcagatagggtcaggtacccggtgaaacccccacctccaggccaaagacagtttaaagcctgaaagccaagctacgagttaaatcctcagaccagagtgagaacttgtttggcgtgctttcccctaattgattcctacatttcgcctgttttacatatacccactttttcctaattggttttctacgctgccgtgcccacctttgagtggtgtctttgctttcatcttttttgcatactcacaaaccggtcagcatgcactccctattctgagtccataaaaggcccctgacccagccacattggggaacttttccgtcttcaggtaggggaccaacccggtgtcccctctctgctgaaagctgttttcaacactcaataaaattcttatctgccttcctctcccttcaatgtccagtgtatcctcattatcctttggtgtggtgcacgagctcggaaccaccgaacgcgggtacaagctataatacagtgagctgggacacacctgcatggccgagcgagcacaggtggggcattgctggcccgaggaccaagaagaaaaatcctacatcaattcctcttggcactgcagtatagttttctcaccaggacgctgaccctgtaaggaacttcagaaatcatgtgactggacccttttactttccagatgggaaaagtgaggcctagagaagagaaattgcttgcctaatgatacacaacaatgcgtggtctacttttagtgcacctttttgcgtaaaagggaaatggttgcatcaaaccagtagttgttggtactccagagaaaagccaaagttatggttgttataacaacaccctttaagtcagagaaccaattccttatggatttaaataggtttggttattaagcaaagccagggatcccagtagtaggtatgctgaatagtgcaattatctctggggatcagctttctttagtgtttgctgaacggttcactttactcttgtgctgggttcctccatgtctctgtcttgtgcttccccatttaggggctgctttgtatgaaatcataaggcaagaggcagtgagaagacagaagagagaggcgccacttagctgttcatgctacttaacctcttgggctccagtttccttctttgtacagtgagggttctccttgcccagtctctgcacaggctgttccagcggagcggaagatgctcaggccataggaggggtttggggtcatcttcctgtctctagtattactttaaaaccagcaggctgggccaggtgtggtggctcactccagtaatcacagcacttcaggaggccgaggagggaagagttcgaattccttgagctcaggagtttgagaccagcctgagcaacatagtgagactacctcccccaccgccatctctacaaaaaataaaagaacaaaattagctgggcatggtggcgtactcctgtggtcccagctacctgggaggctgagacaggagaatcgctggagcctgggaggtggaggttgcagtgagccgcgatctcaccactgtactccagcctggggacatagcgagaccctgtctcaaaaacagaaaataaaacaaaacaacaacaacagaaaaccagcaggctgcctctgcgttgtgtaaagtgaggggagtaaggcgtatgaatctcctggggttgttgagggcattaagtcacatgatgcattcttatgactggtcagacctcttggcaggcttgagtgcttaccagcttttaaaaaattttatttatttatgtatttatttatttatttattttttcagatggcgtctcgctctgtcacccaggctggagtgcagtggtgcaatctcggctcactgcaagctccgcctcccgggttcacgccattctcctgcctcagcctcccgagtagctgggactacaggtgcccgccaccacgcccggctaatttttgtatgtttagtaaagacggggtttcaccttgttagccaggatggtctcgatcaaaaattttattttttttaaacttttattttgggttcagaggtacatgtgcaggtttgttatacaggtaaacttgtgtcacgggggtttggtgtacagagtatttagtcactcaggtactaaacctagtacccagtaatgattttccctgctccgtttcctcctcccaccctccacccttcaagaaggccctggtgtctgtcgtttcccctctttgtgtccacgtgttctcattatttagctcccacttataagtaagaacatgtggtattgattttctgctcctgcattagtttgctaaagataatgacctccagctccatccctgttcctgcagaggatatgatctcattcttttttatggctgcatagtattccatagtatatatatatatgtaccacattttctttatctaggctactgttgatgggtatttagatctttgctgttgtgaatagtgctgcagtgaacatatgcgcgcatgtgtctttatggtagaacaatttatattccttcgggtatttactcagtaatgggattgctgggtcaatggtagttctatttttagtttttcgagcaatccccacactgctttctacaatggttgaactaatttacactcccaccaacagtgtatcagcattgccttttctttgcaaccttgccagcatctgttactttttgactttctgataatatccattctgactggtgtgagaccagcttttaaagtggtagggaatgttagtgggagaatgaccccgtagggtaagctcatgtgctcagattagaagacctcacctgtcacaaagaggtgtaaagcaaggcctgccaaactatcaagggaggctttgagcagttgtgaagtttgtgtgactctaaggtgactagaactagtaaaaaaaaaaagaaaaaaacccagaaccttcacacataagtgagtaatatctcaagtcattctatttatgtattctgtatttaccgacaaacaggtggtgggagtggagggggtcttgtgcttagcctgggattacaaagagcatggagacccacccattctttgtccgagggaagtccagcctagctccaccacccttgcttaaaacacttttggctctcccttagaaattgccctcaggagctcagagaaaattgatctaatttgtctcagtattgacctctggggtccccttctcttcatgaataaagggaagagcaggtggtaaatgacagaatacaagagggaaggcttcagagaaaatctggccctccataaatatgaggacatggttgcattaaaaatatacaggaataattcattaatgaaattcacagtaattgttctggaccattagattcctgagaatttagacagggaattagttgctctgatgtagtatcagtgatttgttccataagaactgaattagaggcaaatgaattttttcttgcttgtctgcagaaaactatacgatggcagtctgactcctatagatgtatttttgataggcttatatgtaacagtagcattgagcagtacagtttcaccatattaaaatactgagatgattttctaagtaattattacaccagaaaggtcaggttagccttcagaatcaatgtagtgatttaaattttatttattctgattataaaaataaagctaggggctgggcacagcggctcatgcctgtaatttcagcactttgggaggctgaagcagctggatcacctgaggtcaggagttcaagaccagcctggccaacatcgtgaaaccccatctctactaaaaacacaaaaatcagccggacatggtgggcaggtgcctgtaatcttagctactttggaggctgaggcaggagaatcgtttgaaccctggaggcggaggttgcagtgagccaagattgtattactgtactccagcctgggtgacagagcaagactgtctcaaaaaaaaaaaaaaaaaaaaaaagaaaaagcttgaccattgaggataatttggaaagtactgtacaaaaaaacatagagaaacagaaaaaaattccgctatccaaaggcaacccctcttaacagttggcaattttccttcttcttttttttttaaatggatatattttttgtaaatggttgagaacatactgtatgtgcagttatgtctcttgccttcttgcttaaccttcccatatatacatttcatggttaacattgcattaaagctgtattctttcattcgtcacccatatcagctgttcggcgtctccaaggatgtgtgggcccctgggatctgatcatttcagtgagggcctataaaatttcaggagcctccaactgcctctgcctttcccaccattgcctcaggtgttcagccatcacccgtcggttctttagaagtctacaggtactgacagtacagtggggagagaagaggcctgcacatggccttgagttccagtctgcccttgtgaccttcaaaaacttaactttaataccccagtcttcaacgtctgcatatgttaaatgagcaactccaaggtcacttattaatttattcaccacatatttgagtgcccactctaaaccaaagacaaataagaagagcttagttttttagaagctcatagttcaaaggaggaggcaggggtaacaagagattagtgcaggatgccgtgcgaccttgaggagggagtcaccaatgactggagcagtgggaatggcctcctgcatgaggccacactggacagccaaccacatctaactttctcttattgtaattgacactgtgattaaaatatctgtgaagagccaggagtggtggctcactcctgtaatcccagcactttgggaggctgatgcaggcagatcacctgagatcaggagttcgagaccagcctggccaacatggtgaaaccctgtctctaccaaaaatacaaaaaaacagccaggcgtggtggcgggtgcctataatcccagttactcaggaggctgaggtgggagaattgctggaacccagtaggcggaggttgcagtgagctgagatcgcaccactgcactgcagactgggtgacagagcaagactgtctcaaaatgaaatgaaatgaaataaaataaaatattcatgaagaaatctctgttcattttccagatgattcccatagggtagtcctaaagttgaaattactgggttatactttaaagggtatgaccatttttaaaacttcatggatttagttcaattacctataaagtcttaaagtagctaaatatatattgtgggaatgggaaaaactaacagcgcaagcaagtcgggatttgctttcttgcccactatgtatcgcctatgtagacttggacaagctacttaagcttactaagcttcaatttccttctctgtaaaatggggataacagaccttatctcatagggtgattatgagcattagatgaaatcgtgggtgaaaggctcagtacagtgccaggtatacaagaagcattcagttaagtaatagctgttattgttataactgaggttttcacaagccgcacacttttgctcctgatattttttcttaccatgacagcaggccattgtttggttttctgtgctgagggaagcagaaagttaattaaaatggaaacccccaccaagtgacaagttgagagagaaaaatgatcgttcacatgatgcataaaaaaagaataaaaggtcttttttattagggaaaatttcaaacatacaaaagcacaaagaagagtgtaaggaaccctatatcatatcccttggcttcaactatgactgaaacgcatggctgatccgtaaccccatggtcaaccccagattacgtgcaagtacatcccagacatcttatcagccgagccatagctatttcagtcacatgatacatatttgaggcactgagttgtgctggctaagagcctgcctctgctgtcgcagtcatgggactgtgtgtgtgtatgtgtgtgtagggaggattgggagtcaggagagagacagaaagtcaacctaggacctttagggaggattgggagtgaggagagagacagaaagtcaacctgggaccttttttttttttttttcttttttgagacagggtctcgcactgtcacccaggctggagtgcagtgggatgatcatgacttgctgcagtctctgacctcccaggcacaagcgatcctcctgcctcagcctccgagtagctgggactacaggcatgcaccaccacacccagttaattttatttattttttttgtagagatgggtgtctcaccgtgttgcccaggcttgaactcctgggctcaaccgatcctcctgccttggcctcccaaagtgctgggattacaggcataagccactgtgcccagcttccaacctgggcacttcttaagctttactgcccaagtaaggaggccttgctgtgtcacaaatagacagggtggaaggagcactgaattcggagtcaggaaacctgatttcaaataagggccccaccccttaatggatttatgcttttagaaagtgacttttgaatttcttggagcatatttgtaaacattttgtgagtattaaatgagataacccatgtgacagctcaagtggctcaatatgagttggacctaaatcagactcgagcccagccttcccttcctgagaggcagcctccatatgcagtttaggtccctgactgccacctgcagcctcaccagaatgcattcagggagcgttgctgccggtctctcatgccgaagatgtggtggtagctcagatgagcacctgacacacacaacgccccatgcttgcaaatctcccatcccctctgttagttagccccttccctctgctttatggatgaggatgggggacctagagaaggtcccagtccttggtagcaggccctctctcacaccccatctatgggaagacagggtcccttttctacctctgactttgatgattcttggtctcctctaacttgctgttacacccaagtaggaatttttgactcaaataaaataggaaagtcgatccgatttagtaatcaagtcaaagtcctctccttaatccactgggacacccattatttcaagacctggactgtgacttgtggtctctggctgttggtggctagctctgtgaccttggacaaatgcatgccaccctgggtatgccacctcagagaatcaactctcagccctgtgcagccccttccagctctgagattatcaaatgaaacatacatgtaagactgggaggcttcttcacataaataataaatgaaatggttttttttttagagtattcaaatggggtaaaaaattaacccctcagcttatgccattcctccctcattccacttctctttgcaatgactactgtttgcagtttgatgtctgtccttctaacccctttgtacacatttatatatgtatttgtggctatatgcaaatacatttttaaaactcagtagatggattacaatcaaacttgttcaacccgtggcgtgggggccgcatgtagcccaggatggctttgaatgcggcccaacacaaattcgtaaactttctttaaaaattatgcgtttttttgtgtttttcttttttctttaatctcatcagctatcattagtgttagtgtattttatgtgtggcccaagataattcttccagtgtgggcccagggaagccaaaagatcggacattcctggcattatactagtccatttacaaacttgccttgttcattttactgtgtgtattggaggtcttcccatgtcagtgtttttttttttttttttcatagctgcattgcattctatattttgaatgtgtttaccttaccaatcttctgttgatggacatttatgtattcccataaaaatatatttctaagtgtttttagacctcaaacatatggagagatggttgtaaatgtcagtgggttaaatgaacctagtccatcaagttctggaaaggatggtgagagagtgggcacagaaacactggggtctgcactctggaaagctgaattgaagggctctcaggaagctaccaagaggctgtttgcatggaaggttatttttggagatagcctgcctggtttggtgtcctcagcttcaagtgcaaacactgagctgcgtcatcacgttcccctccccttcccaccatccttgggccttccaagtttgtttctggtctcagggtcaggaacaggacctcgtgggagaactggcacttaagtggtagggagggaggagagagaactgaagaaaaggagtgtttgatctcgggctctggaggaggaattgttacagttatattgtactttgtctggttgttcaaacctacctggagtgttatgcttccctgggtccctccagagagtgataaaatgatgcacacccagaaattggctacttggatgacagtggcttaggacaacatatcggaggtggaataaatgtggaaactaggactttctagtctgcaagagataaaaataagaggcatccttttcatgcggaagaaatcacacttcattacagtcacactgagtggctgctgcagacgggagaagcaagatgggcggggggtgaggaggggaaagagttgcaggaaaacaaataaggaagaactgacttaacggagctacccaacaatggaacaagctgtgttacaaggaagccactgccgtgttataaagtgatccaagcaaaagttgcaagtaggctgggcacggtggctcatgcctgtaatcccagcactttgggaggccgaggcaggcggatcatgaggtcaggagatagagaccatcctagctaacacagtgaaaccccgtctctactaaaaatacaaaaaattagcccggcgtggttgtgggtggctgtagtcccagctactcgggaggcggaggcaggacaatggcgtgaacccaggaggccgagcttgcagtgagccgagatcatgccactgcactccatcctaggcgacagagcaagactccgtctcaaaaaaaaaaaaaaagttgcaagtaaacttgtttgccatcagaggacttctgcattgcagaggggttgacctcaatggccacttaggccccctgcagctttgagagtctgtgactatggggcaagaagcagaaaggtgcaaactagaactaaaggggtgggacaagttatagacaatgtagtgaagtagttttcacctgctctgaaaaggtggaataagatggaagccatcaaaggaggcttaagccttgtttcccttggatcttggcaactctctccctgttctgtccttggcttcagctccctttgaccttgtattcttaaattatttccacaggaataaataccttacgtacactttagatgatcaggaaatctggcacctggaaaagaactgcatgtcccaggaggatggttgtaagttttttcattgcagtctttgtaaatctgcatccgtctgttggttgatggagttttccttagtacagtgccgagcttccagctttaattttaggaatgctgtaccctttacaacctctcgatggtcctctgtgctggaatcgagggcacccaccgtgtttaaggctgatccctttctttcctgcaagtgaagaagaatgttttgacttaagtcttaaccaagtctggtgaaggaaacgtggcaaaatttaccatcttctgggcttttgctgtgtgcctggccctgattaggcatgttgtgtgttctctcatccaatcatcacaggaagatctgctgtgtcggtatcattagctccattttgcaaataagaaaaccaagcttcagaaagggctagaaactcatctaaagtttcaggtgcccaccactacgcccagctaatttttgtatttttagtagagatgaggtttcgccgtgttggccaggctggtctcaaactgctcacctcaggtgatccaccgacctcggcctcccaaagtgctgggatcacaggtgtgagccactgtgccgggactgcagtgctcatttttagaacatagatccaaataatccccatagtctgttgcttccagagcttagttgaaggcagatatgcacatattaattacaatatagtgtgataaatattatgatttgggtgtgcacagatgatgggaagaagatccagtaagtttgggaaagatttctggaagaggcaacacacaagctgtgtcttagaaagtagtagctgttagcctctgggaaatgagcatttttgaggcaggggaaggctgcaggagcaaagatttgagggtgagaaatggctcattgtatatgtcagggaaacactagcaggttgatattcctggagagaaatgcatgaggcatgaagtggcgggacttgaggctggaaccattacatgtgttatttaatagaattttcataacactgcatacactattattatctcaattttttattttattttatttatttatttttagacggagtctcgctcttgctcaggctggagtgcagtggtgcgatctcggctcactgcaacctccgcctcccgggttcaagccattcccctgtctcagcctcctgagtagctgggattacaggtacacactaccatgcctggctaatttttgtatttttagtagacatggggtttcaccatgttggtcaggctggtctcaaactcctgacctcgtgatccgcccgcctcagcctcccaaagtgctgggattacaggcatgagccaccatgcccggcctattatctcagattaataggcgaggaaacaaaggttgaaggagattcagtgacttgctcaaagtcagaccgtgagtgtgttgagttgcgtggtcttgaacataggcctgcttgcctccagagcccatgtctcagcctccacttcagtgcctgcagaggcaggctgtgaaagtctggcttgctggctaagacgattgttccctctcttttaatgtttcaaggacaacatcccttgccgaatcctcttctttcaacctgcctcatggtgttacccaactttttgttaaattgggactagtgggtctgatgttgacaggttttctgagtcttggttctagggttcaccttcctttttatccagccaatcagtaatccagaagtcttcaaataaaatctttatgtgcccaaccacgtgtgaagagggagaagattcatctcgtttctcaaaagatccaggtttatttgtgagcccaggtagtgcctgcgaatcctttagtttggagaaacactttggggactggaacaggaacaatcacagctggctggaggaacgtggggtaatgggccttgagctgtccctttaaggatgagtaggagttgggaaggtggagggcataacatatgagcaaaattattgtctcacttaatggtgaatgggacatcttttgcctattctccccatcctccaagataattcctgggttagagttggctctcgggtaggagaggcagtatggggaattcattcatgcaaaatcaagattattgaaaactaattaattggatcccaaagacaagatgatgaaactactcaatgaaataaaaaaggtaattacagagccaaggaagacattggggataaaaacaatgtcattacagaaaaagttaccaggaaacataacagaatctgttgaaaatgaaattgctaacagagaaggaaggcttgaggaaaatcacagcctatgctgagaaaaaagataacgcacttaaatcagagatctaaagatcatacaaaggtgggccttcaaaagggtaattggagagtctgcggaggcactcgtcgcttttgctcatattccattggccaagacttagtcacatagatagacacacctggctgtaagtaactctgggaaaaagtctccagctgagaggccatatgccttcttaaaactcagttttggggaaagctttctactactgaaaggaaaacctggatattgggatcaactagtatctgctttaagggaagtcatgttggtctcagacatgactgaacaggtttacagaggccaggtgaggtggctcatgcctaaaatcctagcactttgggaggcagaagcctgcggatcgcttgaggccagaagtttgagaccagcttgggcaacatagcgagaccctaatgaaaatcatcagctgggtgtggtagtgcatgcctgtagtcctagctacttggaagactgatgtgggaggatcccttgcccaggagctcggggctgcagtgagctatgattgtgccactgtgctctgggctgggtgaaagagcaagaccctgtctctatttaaaaaaaaaaaaaaaaaattgtttacagagttctggggcaaaggcaatgggactgaagaattttacactcaaattactttgcaagtatgtcaggcagacatcctcacacttgcaagaatttagggaatctagcactgaagaggccttctcaggaaacccacttgaggaagaaaaagattaatcgacaaacatacttagaaggcatagtggaaggtcaattggtgaactcttaatccgttcaaatagagaagcaaagctaagcaggggcagggatgggcagtgaggactaaggaacagaatgtgaggaagtagaaagaatataccagaaatagggggttaggggagacgtgaggagatgttaagtgctaactttaattagaagtgtaccttttccggctgggcacggtggctcatgcctgtaatctcagcactttgggaggccaaggcgggtggatcacgagatcaggagatcgagaccatcctggctaacacagtgaaaccctgtctctaccaaaaaaaaatacaaaaaaattagccaggcgtggtggtgggcacctgcagtctcagctacttgggaggctgaggcaggagaatggtgtgaacctgggaggcggagcttgcagtgagccgagatcgcgccactgcactccagcttgggtgacagagcaagactccgtcaaaaaaaaaaaaaaaaaaaagaagggtaccttttctggccgggcgcggtggctcatgcctgtaatcccagcactttgggaggccaagcgggtggatcacctgaggtcaggagttcgagcccagcctaaccaacatggtgaaaccccgtctctacgaaaaatacaaaaattattttgtactgggcatggtggcgggcgcctgtaatctcggctgctcggtggggctgaggcagaagagtggcttgaacccaggaagcggaggttgcagtgagctgaggtcgtgccactctagcctgggcgacagagtgagattccatttcaaaaaaaaaaagtgttccttttccttataaaataaaataataaaattagctattttattttacttttaaaaaacttattattattattttttgagacagtgtctcattctgtcacctaggctggagtgcagtggcgcggtcactgctcactgtagactcgatctcccgggttcaagtgatcctcccgccggcctccgaaagtgttgggattacaggtctgagccactgctcctgacccaaaacagctattgtgtaaagcaatccccatctatcctttcacgcatgctttcttccatctttcacacttctatccatatacagatatagagacttgaggaatgatactaattcatttattttttcctggatagagggctcttgggtgatttttagctctatatagttttgcatattgattgacattttataaataatgaactagtcttacttaaatcagaccactgaagctattctgaaaggcaccattaaaaactggttcctggggagtgaagagtgggaacggagatacagatggatgaacactgtgggggatttgagagtcagttatgcaaacacctcactctaggcagaacaaaatacgttatcaatcagatggacagctggggattggggcccacacgacaatggaaaaggtttcacccaggagaccgatggagttttgataggtggagaatgggagaaaggacctttctggcctgggggcagcaggaacacaggcctggggatgaaggggcgttggcatgtctggggttactgggagcagtttgttggtggttcgtggttggagaagcaaggatgaaggaaaacatggctgctgttaatacagtgtgcacagcacactagatactacacgtagatatctctaggttgcccaacaaccctatagcacaggtacaattatctctactgtacacatgagggaactgaagttaagggtgagagatctgtgcttgcttcagcagcacatacacgaaaagtgcaatggtacagagaaggtgagcattaaaaaatagtgatgtttatctgcccagaggcgcatggtggtgagactgatttgagctccctgtgctgcctgcacagccatgcccatggtttttctattgtgctatgatttgtggtgcacagagaccggaatcagccacctttatgaaacacaaaatgtaaaaataattgtataggtaaatattttataagtaagtctattttatacatttacgtttatgtttagattggtatttattattatttacatttacctataaaataaaacatggtttagatgtaaattttgtaggtaaatttttaggtaaatataagagcctacatgatggtccagactccaccatccagcagccgtgtggccccaggctacttaatcagaaccctaatttccttgcctatagaaggggataataattgtgccactgcctagcctgagattagtttttatgttcaaattagatcatagacgttaaggatgagacagtttgaaagaggcacacagaagggtttgttattgcggacacaccccttgctctgctgagagcatacatctgttcaagcacccacaggtgtctgtgaaaatgttcacagtcatagacacagcccctacagggttgacacaaacaacctggtcaacaggcaagaaactgcttccctgactcagttaaccagctggaggctgtaatgaaaggcagcagagagtgagggagggaggaggcagggagtgtgtctggctctctccctgcctgggtgagaatccgctcttgcctgccttcctggttgctggggaatttctgggccagagttgcgtcgggatggctgtcaacagcttggtgagggtggaggaggctgttccagacgtgccaagctacaggaatgaatgttggagctgccacgccggcaggccctgccatgtctggtagacgccagtggtctgaaagagggaccaggaaggatagggttgtcaggggacttcggtggccagctttattctccagaagtaccgatgaggacaaagcaaggccctgacctcaaagaaattgggcttctgacaacacttatcaaactgggcgggcagccagacctctgctctgagctagtgtggctggaggcacctgacgtttgctccgggaaggatcaggatggttgtagggtgtgggctggggcctggtatgctcttgggggttcagaaactctagtgtgtgtgtgtgtgtgtgtgtgtgtgtgtgtgtgtgtgtgtctgtgtgtgtatgtggtcgttggagagagacccaggctattccatatcgctgaagagatccgtttcttccttatctcactggtctctctgctataccaacacctttggctcagcctcagctccagccagcctcagttccggaggagccccctcaaattcatggcccacaaaggagagagaagacctccgatctcttgtgccatgctcactatgctatgtgaaatttgctatgttagaccttgacatcctggatggtggggatgatgactggtttctctgcacagccctgggcccagtatcctgcccagcccttaggagtcctcatggaatgagctcagctcccgcgatgctcctgtttgtccactgaggtaagaacacatccagccaccagtgagttgagtgggtgttctctcggtaagatcaaggtgtgacagcaggcagtgaatttgcagtagcccgtggtgggaagcccgtgaggctgtagtgggccctcctgctccaccagagagtcatttttcctacctgccaattctagccttggaaataaaagccaagcaggcgggtgaaagagggaaaattctctgggatggttcatggatctgagccctggaggagagtcaagcttgggaccttgttcttcttgtcttattttgggaaccagggtcataggaatttgttccaggtgagagagggaagaaggcagctagggagctgtgacgtggcagccaggctgagttatcagttacctaagagtctgcctcagggattgcctttgtggactgcacagtgctggttctgggaggaggctggccttgggcctgagctggaggtggtggctgacagtgtgaggaatgaatccccagaagatgattcctgccagagggcttgtgacggctccttttttgcttttcacaatgaacatcttattctgggctgcaaatttggatgaggggaaaaaactggccaggaggagatgaaccaaaggcgtctcacagggaatccttctgtacttgaagagtcctgcccttgtctccccagccagatccagtgactcacagtaggagggcttggaggcaactcactgccttccctgttaactaccgtttgcaatgtcaccttcctcagaaagaccttatcattcggaaaaaaaaccacatgctttgtagccagacagacttgggtttaaattccagatatgccacttctcaggtgtgcaagcttggcagcttggcctctctggtcctcagtttcctgtcttagtctatattcatcctttctgccttgtagcattggtgtgagtcctagaggtagtgcctaacctagttttgggcacatggttggagaccaataaatcgtggttattttcaatatcacagcacatgtgaacggttattctcagttattgtccacctgatgggccactttgctaggggctgtgaatagaaagagaaatgagatacagcctctccctggaggagctctccatctaggaggagagccaggcctgtggaagggggcacaaaggaaagcaagttgcacaagctgtggagggagctggaggcaggggcagagaaggccagaaaaagagatgatatcctcaaaggctttaaaagaatgaagaagaatctgccaggcagttggggcgggggcagcattggatccactcataagggagggcagagctaacagtggaggctccctggacaggtgagccctcgggcttccccctctctgctggcatttgatcctactcagtttgggtcaggatagagtctgcagtcattttccagcaggtggttttacatgggcaggaatccagccaggcctgactgggggagagggtgttgaggtggcacttgtcatcccagtgatctctccataggtatctgggctccaggcttagggctaggagcaggagtgggcctcctcagagggagtgggacagattaccaggcaggaactgcaaaggcagagctcactaaagtgcaggctccaggtcatgtggatggaggggcttcacaaaatggtacaaagcggttgttatcaaattcagacagcaggtaggtgggaggaggggtgacctgtgacttctgtgatttctgggaagtccactgaccctttatgcagtgctcagtgtcaaataaaaagaaccggagaagaccaccttgatagttaaggatatacatttgtggttttagttattcacaaatgactctaaagttctgtgatatgatatgattgggtgaatcatttggatgagataaaaacaggattttatttgctgcatgcatgttgtgtgtcacctaggtggtgataaaaacaaacgtagaagctttcatttactgaactcttaccatgtctgggcatgctatatgctttacaagtatctcatttagccctggctaaatccagctctttgaacaccatacctactccacaaatctgagtgtgactgtagaaaagcatagtgtcatcctgaatggtcccactctaattcttttttgtttattttttttgagacagagttttgtttttgtcccccaggctgcagtgctatggcgtgatctcggttcactgcgtgcagcctctgcctcctgggttcaagcgattctcctgcctcagcttcaggcacctgccaacgtgacccgctcattttttgtatttttagtagagatagggtttcaccatgttggtcaggctggtctcgaactcctgacctcaggcaatccgcccacatcggcctcccaaagtgctgggattacaggcatgagccactgcgccaggccgtaattcttggccatgactcttaaggggacattggtgttgtaggccatgtcgcttcattttgttggtccattggttctcaaccctggctgtcattagtgttactggtgggaattataacacgtattgctgcctgaattcctctcaaactaacgaaatcaaagtctttgtgaggttgacctgggcaccagtatctctttgttaacctgtgctgttaattccaatgaatgatagttgagaagcatgaccattcctctgtcatctagatgactgtttcgcacctttttctctctcttcaagtctctaacaccttccctatccatactctcagttgataccttgttttaaacttacctgaaaaaataatggcagtcggaggaaaactttcataccttttgtcttagtccattcaggctgtgataacaaaataccgtaaacagggtggtttataaacaaaagaaatgtattgctcatagttctggaggctgggaagtccaagttgaaggcaccagcagattcggcgtctggtgagagcttgcttcctaatttatggatggtgctttttcaccgtgtcctcatgtgctaacagggctcactagttctccagagcctcttttataagggtactactgtatgagtccatgttgccttgctataaaggaaaacctgagactgagtaatttataaagaaaagaggtttatttggctcatgattctgcaggctgtacaggcatggcacccacatcatcttctggtgaggcttcaggaagcttttactcacggcaggaggtgaaaagggagggggtgtgccaatttttatgctcctggagagagttgtctgcatttgcaccctgcactccctcttctctcattctcatttaaactcaacatgatcagtcttttgtacccatcacaccaccaaaaccataccggtcaggctcaccagtatcctctcttgccaaatccagtggtcagatctcagtccctatcttgactgatcagcaacttttgatacaattgaccattccatcctccttgaaatagtttcttctcttggcttctggaacatcactgtctttgcttttcctcttctctcactaggttctccttctcagttccttttcttggctcattttcttttcttttcttttctttttttatttttattgagatggagtctcactctcttacccaggctggagtgcagtggcgcgatctcagctcactgcaacctccgcctcccgggttcaagcgcttctctgttggctcattttcacttggtcactgtggagtgcctctgggagtggcccttggacttggcctcttctctgtctcctcatgccctggccatctcatatcatcaatttcctgacaaccctcaatttatatttccaacccacacctttcccctgagttccatgctcagatattcaaccatctacttgacaagtttccttagacatctaatatacatctcaaatatgacaagcccaaaatcgaactgctgcttttctccctaaaagagccatcctcatttcagtggacaacaatttcatctttccatcttttagggcttaaactctggagtcattctaaattctctttctctcatgctgcacccactctgttagcaaaccatgtcagctgtgctttcacaataaattaagaaacaactacttaattcatcaaattcatgttggtccaggacagaagacctgttctttctcttagaatcgtttcacaactgagcctcctgcttgtagtcttgctcctgtggtatgttctcaaaacagtaaccagagtgatcattttaaaagctgtagtgatgtgtcattcttccgctcaaaaaccaggaaaggcttcctcttttactcagagcttagaaaggcctacaggattctgtgtgacccagccttcagaccctgcagacttcatctcctgctcttttccaccgcttcattctgcttcacctcactgagcctactcctcagatataaagcacactttggtctcagagcctttccactgcttcctccaggcaggacaccttccttcatgtatcctattgttttcgtctcttcttcaggtttctatttagatgtcaccttgtcaaacaggccatttgacagccttatataagattataatctcctgcctgtctcctcccaccgacttggctctctcccttttatccttccttgttgctgttcaatagcgtaggtggccatctgagttactaccctgtgtcttttctcactaggaacttgcttccatgagggcaaggatgttatctcttttgctcacagctatttctttaggacccagagcaatgcctcaggtatcataggcataatccacatttgttggctgaatttaacaaaatcctcacaatgacatttcaaaattagttggaataacccaaaatttatacatgaagaaactgagacacagagaggttttttttttttttttaattttattttattttaagttccaggatacatgtgtaggatgtgcaggtttgttacataggtaaacatgtgccatggtggtttgctgcccctatcaacccatcacctaggtattaagccccacatgcattagctatttatcctgatgctctccctcccccaggccccctgacaggccccagtgtgtgttgttcccctccctgtgtccatgtgttcttattgtttagctcccacttataagtgagaacatatggtgtttgattttctcttcctgtgttagtttgctgaggataatggcttccagctccatccatgtccctgcaaaggacatgatctctttcctttttatggctgcatagtattccgtggtgtatatgtaccacattttctttatccagtgtatcactgatggacgtttgggttgattccatatctttgctattgtgaatagtgctgcgatgaacatatgcgtgcatgtatctttataatagaaggatttatattcctttgagtatatactcagtaatgggattgctgggttacatggtatttctggttctagatctttgaggactcaccacactgtcttccacaatggttgaactaatttacattcccaccaacagtgtaaaagcgatcttatttcttcatagcctcaccaacatctgttgtttcacggctttactaattgccattctgactggcatgagatagtatctttttgtggttttgatttgcatttttctaatgatgcatggtgttgagcattttttcatatgtttgttggccacataaatgtcttattttgagaaatgtctgtttatgtcctttgcccactttttaatgggttttttttttcttgcaaatttgtttaaattccttgtagattctggatattagagctttgtcaaatggatagattagattgcaaaaattttctcccgttctgtaggctgtctgttcactctaatgatagtttcttttgttgtgcagaagctctttagtttaatcagatcccatttgtcaatttctgcttttgttgtaattgcttttgatgattttgtcctgaaatctttgcctgtgctgatgtcctgaatggtattgcctacattttcttctagggtttttatagttttgggttttacatttaagtctttaatccatcttgagttaatttttgggtaaggtataaggaatgggtccagtttcaatttgctgtgtatggatagccaattttcccagcaccatttattaaatagggaatccttttcccattgctagtttttgtcaggtgtggcaaagatcagatggttatagatgtgtggtcttatttctgagatctctgtgctgtcccattggtctgtgtgtctgtttctgtactagtaccatgctgttttggttactgtagcgttgtagtatagtttgaactcaggtggctggatgcctccagctttgttctttttgcttaggattgtcttggctatatggactcttttttggttccatgtgaattttaaagtagttttttttctaattctgtgaagaatgtcaatggtagtttaatgggaatagcatttaatctattaattattttgggtggtatggccattttcatgatattgattcttcctatccacaagcacggaatgtttttccatttgtttgtgtcttctcttttttttttcttttcttttgagatggagtgtcactcttgtcacccaggctggagtgcagtggtgtgatcttggcttattgcaacctccacctcccgggttcaagcgattctcttgcctcagcctcctgagtagttgggactacaggtgcgtgccaccatgcccagctaatttttgtatttttagtagagatgggatttcaccaggttggccaggatggtcttgatctcttgaccttgtgatccacccacctcagcctcccaaagtgctgggattacaggcgtgagccaccatgcccggcctgtgtcctctcttatttccttgagcagtggtttgtagttctccttgaagaggtccttcacttcccttgttaggggtattccaaggtattttattctctttgtagcaattgtggatgggagttcattcatgatttcgctctctgcttgtgttttgctggtgtataggaatgcttgtgatttttgaggcgcagagaggttaaacaactttttcagagtaacacagcttgctagtgtagaactaggactcaaacctgccaagtgactgtgtcgttagatcgtctctctgtggagcctggccttccccctgcacccacatctcaactgcctcatttttttcatgtcttgttgcaagcagccggtcccacagagtgagaaaaatccctgtgaaaaatgtcgcaagtgtgactggaggtgtgggaaatgcatacacaaacaagcccttatctgcaactttcaagtccaaaaatttgtgaaagtcaagctttattcttaacccatttggtggcaaaacctgatttggactgatgtgaggctatttataaatctatgcctgtaaaatgtttgtgtttgtttttttttcttcctggtaaattagtatttcctttaaggctctttccaggaacatgctcagttttaagacccgattaagatcaggcacagcaggccaggctaagaggggcatgtgtgaaatgcagttctataccagagggaatgagggaaagtccacatgctcaccagcgaggcctctcgctgctcccagcactttttctgcttctgtcacacagtgctggatactagagtcaaattctgctttccctagtcatgaggctagaggagtctttctgcataaacttaagagcccaagagaaaaagcctatagatattgatatttagggtgttccaaacaaaatttacagctgactcacaatcaccctcccgtaagatccaccagttcagaagcactgatcatgcacacagaacatccggtcagtttttagtgtctcacttttcaatttaaaaagacagctaacgatcaccagatatttgagaaaagtttgaaacatgaaaggcagaaattaaaagagacaacaacagcactagaaactcacaagaaatagagaaaatatagggagcagaagaaaacttcacaaaacctgtaattactagtctaagagagataagagaatatgttgcattaataaaataaaagcaatgtgcaacaaagaggagtttcagagactaagaaagaacttttggaaattaaaagtgtgatagaagaataaatcagtagagggtttggaatatagaattgaagaaaacttacagaaccttgcagaaagtcaaagaaagaaagaaaatgtgctgggcgcggtggctcatgcctgtattcccagaactttgggaggccaaggtgagtggatcatttgaacccaagagtttgagaccagcctggccacatggcaaaaccccacctctactcaaaaatacaaaaattagccagacatggtggtgcacgcctatagttccagcaacttgggaggctgagatgggaggatcacttgagccaaggaggttgaggttgcagtgagctgaggttgtaccactgcactccagcctgggcaacagagtgggaccctgtccctcccgcctaaaagaaaagaaaagaaaaataagaaggattattctaagaagcccaacatcagaatagtaagactcgcagaaaaagagaatagagacaatgaaagggaaaatttattaaagaaataatacaagaaaaactttgagaacattgaaaggacattgaaaggcccacttgagtacctggggctgtgacttgaaaaaaagacatacaccagaagaaaagcttcttgacaggagaaaatcctccccccaaccaaatggattatatataacaatagaaatatgattgacatcatctatctctacagaagctaggagacaatgaagccattccttaaattctgagaggctagtatttccaactgagaaattatatcctgacaaattattaatcaaatatgagggtggaataatggcattttcaggtatgagaagtctcaatgattttatctcccacacagccttttttgaggaatctatgatgcatttgtttctccaaaactagacagtaaactaagaataaatgggatcttcctttaagcacagaaagcaaccacttcaggttgaaggaggagaatggaaggttccagaagggagatttttaagaattaaaaaaaaaaaaaagattagtacataatggtatatttagtgtactgtgatgagttttatagttttgttggaatgttgagggctgaattcgtgacaagtacatagaaagttaagcagacaaacaaatgaggtaataatggactctacaaatggcaactaagaaatatacatgaaaggaattaattgtaacaccacacatggctcagctatgaataataatttatctggttataataatgtaacttaataattacttgacaaaataatgtaacttaataatatagctattagtgttgacttaataaaaaatggtataactattgggagaatgtgggacaggagaggtggtatatagaatggtggtaaggagctaaatccttattttctataataggaagttagtgaataatatctaatattgaaaaaaatccagagccatataagcgtgctatttagatacactgagatgactctggaaatagatacaggagttgaaagacagaattagggatatggaggggtggggcagggcctgctgtttctccttacagccttgcagtaccactggaccttaaaaatcattggtgtgtgttgctttgatttaaaaaagggctcaatgtgccgggtgctgtggctcatgcctgtaatcccactaatttgggaggccaaggctggtggatcacttgaggtcaggagttcgagaccagcctggccaacatggtgaaaccctgtctctaccaaaaatatcaaaaattagccaggtgtggtggcatgcacctgtaatcccagctactcgggaggctgaggcaggagaatcgcttgaacgtgggaggcggaggttgcggtgagcagagattgtgccactgcactccagtcagggtgacagagcgagactccatctcaaaaaaaaaaaaaaattaaataaataaataaataaataaataaaataaaataagttaaaaagggctcagtgtctccccctgtatccagattggcacctaaaataggcacccaatcaaagctgaatgattgtttgctgtagagaacatattaacaacacaatcaaataaatgtgcagaggtaccctcctttggaaattttgcatatggcaatggcagaagagcttcccttttctggttctctaaatgcagacaccttttctctttttgtcagagctcacccatgtactcagtgtgcaactcatacttagtttcagctctttgctggaatctcttggcctagcactaaagggaagataaagaaaagcccctgggaggcagctctgggaggcagctttgtgtgtggaactctggcttagtcacttacctgctttgtgcccgtgctgtcaccaaagctcttgtcacctcatctgaaaatggagaagacactcctcgcttcataggcttgtgtgaagaataaatgaataacttagtacataaagcacctggcacacagtagttgctaacaaaaaaaaattgaaattaaaaataaaggaacatttatggtgaatattattaggtctaggacaggagccccgtaatgttggatctgggctccccatatgaaccatcaagaagggatgtgagccctgggagaggaagagggggacagaaataatccggaaagtctccttatcttagcagacgttcttactgtgttttgggtgcagtgtcttctgatttgactgctgtgttcagcagatttgtggagacccagatcctggaatgttttatgcacaaggatcaataaaagctcttagcttatttcacttccatattcaaacataatcaaaaccattgctcacatctcagacaatgtggaagaatggctccagggttaaaagggttatctcacgctgaggctcctgggtgctgagtggggatggctccttgaagccaggggcttggggccacagccttactgctgtgacaggtgaacccctcctctgagtcaacacagagcactcgagcaatggttctgctttgaggggctgggccatgaaattcttggctcaatttatgaacttctttgggttccttggttcctggtgagctctccaaatcctggttctgggtctgtggttggtgcctcacacatggtacacttacttgaaggaaacacttgctggaggcaagaaggagtcactgcgcccaaggcagcctctcatttagccaccctcttccttagaatcatcttctgtgtcatctagatgcttctgggtctaagggcagaggagaaaggggattggctgagctgctgccaggggctctagagttgggggacagtgcagtaagggctgccccaagagataaaacagagaacaggccctgaggagaaggaaggagttgagcacaatcttggctggctgggcctcgagaggaaagtagagagaccaaatctgggtgttaggcccagtgacccttgtgggataggagggaggtcagagagcagaacttgtggtgacagattacagagcgttatgaattaagtggaaactatattaaaatggccaggaagcacgtgagtagataggaggcttggggaccctatgatcagctgaatctgcagtgctgagtatggtgataggaggaagttatataatctacttaatagaaaaaaaaaactttagaatttaagatagaagagtcatccaactacactttagcaatctagcgtggtcctgtcagtagatttttgtttcgttttgttttctgttttttttttaaattttttaaatcttttttattttgagatggtacctgccaaccctagtggcccgcggccactagactcactacatacctgctgtcctgggcctgcatggtgtcctgtctacctctcccagggcctctgccctgctctctttgtaggccagcttcctctccttccatagagtccctgtagctccatcatttgatctttttttttttttttttttagatagagtctcactctgtcactcaggctggagtgcagtgattgatctcggctcactgcaaatttgcaaattccacctcctgggttcaagcagctctcctgccttggcttcctagaaactgggattacaggtgcacgccaccatgcctggctaatttttgtgtttttagtagagacagggtttcaccatgttgaccaagctggtcttgaactcctgacctcagatgatcctcccgccttggcctcccaaagtgctgggattactggcatgagccactgcgcccggccccatcacttgatcttgtgcatggcatttgcttgtcatggttccaccactacctttcccttcactctagggtctaccaccagctgactagagtcttttttcacagttgcagttttgaaagagtgtcagattggcccagcttccttatgtatggacgaattgtctttaagtcagagttctaccctttgtccatcaggggaagtccagatgaatgagcaagtggggtaggggcagggtgggcaggtagaatgacttgcctaaatattggagatctgcaaaccattttccaaaggacttaagaagcacaaaaggaatcccccattccctcatgaagctgcagattgctatggctggagtgtagggtgcatgagagtgacagggcatgaggctggtcagctggaaaggggcatgagacaggtccccaaggcttttgcctgggtcacagggctgagaaacctagttatctgtgtaggtgaattctccatctctcactgaaagtttggcctggagtgaaaggaaggatacaagagctggctagggagagatggagagtggagtcttccttcctgttaaggaggcagagcagtcagcccagcagtgcccactctacctccaccccaggagcactttgctcttgttcccccaggagggctccttgtgggtggctcctagctgaccactagctcagctgtttgcctgtaaagacctcttccctgactgctctcatttccccacagtgaccctggctcctggtgttttgttggcattaattacaaacagcagcaaagtgcccgaagcctcaagcaacttgttctttttccgtctcaccagatgcctttgttgttcgccctgttctgtcctgaatctttgtgaggtcttgacgttaccacccatcgcatggctcacttcagcttcagttctgtctatcagcatctcccgtctcatgggatgactcttgtttctctttgtatctaagggtttctttcccctggacaccgtccttgtgtatctatcactcccctgtccctccacgggtttctctttctctccttacgaattgtcattcatgtacccctctttcccaagcttgattagcagagttcatttagcataatgggtcttatcttaggctggggctgagctgagtgtgagcatgaaaaatgaaaagtcagacttggagaactgcaccttcatttccactagaaatggttacaccaggtgaacgaggatatgtgggtgagggaggggcttgggggagagaggagtgttaggggaatgggcacatttctccattgctgggagcagtttctatggtaccagtagtcctgaaggtagcatgctaagactgttcagaagcctgaagaatttggaagctctttgacccagcacagttttattcctaagactgtgtccaaagaaaataatcatgggactccctggaagattttgtttcaaacactatttgccattagccaaaaacaaaacaaaaggctgaagatgacttaagtgtccaggcttggagggttgggtacaatttatggtacagctctgtggggcactatacatggctcattggagatccttgggtacgtatatattatgcagccattaaaatgatgctgctggagattacttactgacacggcacttactaaaccatgcctagctttattacatctttataaaaaatctgaaaaataaaaacaagaaacaggtagagtatgttatctgtagttatcttggatgaagaaagaatgggtacattttgtctttttcatttaattatattttctaaaatttatagattgaacatactttttctgacacaaggaaacacaattactttaaaaacaaatgccctctattcaggcaactataataatatatgggttgaaaatttaggatcagttaaaaatgcttccaaaatgaattagaaattaaattcactttaaaaaaaactttttttttgagacggagtttcgctcttgttgtccaggctggagtgcagtggcacgatcttggctcactgcaacctccgcctcccgggttcaagcgatgctcctgcctcagcctcccaagtagctggggttacaggcatgaattcacatttgtaacagcataaacaacatactataggtcaaaggagactgtgaacaagcttgatgtagttgttgattgaaatccattgtccgcaggccttctctaaacacgagacttgggcccgatctgtagctttctaacccttgctttttcttaccacaagtagtgagtagcacaaggattccacgactgtagcagagtttgctttgcccaatctgcaacttactctcaaattgtacaaccccagagggatgagtctgggtgaacatgtagctcgtttaggtcctggaaaggaggctggctgccccggagctggcagtgggaggagcaaagactctttcctcctgaatgtattaacgtatgtgcttctggtgaaactttgctttgttgttgttttttaaccctctgcaggcaaggggagagccagttgcgcagagccctgcaaccagcagtccagggagaagtggtgaatgtcatggagcccagctgaaatggactggcccccttgagcctgtcccaagccctggtgccaggtgtccatccccgtgctgaggtaagaccccctgaagcccagcctgaggaagagaggacacaatgccttttttgcaggggcaggaggcagagggccttctcaggaaagaaggagcagttagttgtttctggttcagtcaaaccatctgcttcagcctcagcccgttgggaggcaaggtcaattggtggccaaagaggcttctgctttgtcagagcaggtctttggaatcttgatgggagttgtattttctcagttgctggtgaaatttgaattcccaagggaatacatttatcctccaggtaagactgcaccggattcaggtgaatgcttaagtatacctcctctgctctgcaagggagctcttgggaaacacacacacacgcacacacacacgcgcgtgccacgctctctctctttcaacccaagggtgacagagtgaaacattatgcagagaggttattccaaaacattctgggaagctcactaaaaattgattttaattacctagatatgttctgattataaaggtaataggtgctcatagaatgattggaaaaattctgttgtggaagaaaatacaatatatctgaaaccctgcccctgttaacaatcctccaggtggtattctattaaggttactctttaagcttccacaggatgttgatttttcctgtgtggaggtagaaaggtgaggcagaaggagaacttgtccctaatctggaaactctgtttcccaatttttatatattcaagaattttgcaaactgcttgttaaaaacgattaaaaacaatgggtggcttgaaactgaccacgatggggaaacttatgccatggaaatgggcaagtgctacaacccagggcttttttgttttggaaattccgattagataagcaagctgctggtttcagggcttaccctaccccaggctgtggggcatccggcaaatcacctcccctatgcattccttcatttcctcacctgtgaacggtaggtgcccagtaacatgagttgcgtgaataaatgaaagtgagatttccgtcattatttcatacaacaatcgtgagggtcccataaaataatgaaaacagaaatgttttgcgtacagtgagcctccctgcccctgtagagaggggcttagttgactgggcaacctttggtttagtggtagaagttggctgcatttccccctttggctcttgctccttggggagccttcggattactgacacccttttataaaggcagatgaaaacccaccatttactggccaacatctggggcacatttccttcccggaaaagtcacgaagttggtcagagaagtgtgaaaagggagcctcagcaatgcaggacataagagccagaactgaaatcagagtttttgactcataatctctaatgcgggtgtgggggacttcctgccaaatgtgaaattgcaacaaaagcctctttcttcaaagccctgctgttgcagcagattagagctaataaattagcataatgaagtcccagcctctgtccccctccctctgcttcctgaatctcttcctgtgtcccaaaggagggatagggagcgggtgggacatccgttaagcaccagtttatccttgtagaattgtaggttcagaaaattataaaggtggtaaggtctacagagtccatctggtcccacaccctcattttaagaacctcaggccactgagctggtgattaccagtgactgaggcgaaagtacgtactcctgggaggaagggagctcaggtggaggggtggaggatggagcactgctcaggaggccgcctcctcacagagcttacatataactggcagggaacgtggtgggtggtctccaggtgccagccctgcctcttctcttcctcgtccttcccctgtatctgaagtcccagtgtacttcctgaggtgcctctctagtgtgtttggacttaaggccatcagaggcctggttttctggtcagcaaaatcaactaagatcttattttttattttttcgggacagagtgtcgctctgttgcgcaggctgcagtacagtggtgcgatctcagctcactgcaacctccgcctcccaggtttaagtgattctcctgcctcagcctcccgagtagctgggattctaggcatgggccaccacgctggctaattattttgtatttttagtagagacggggttttaccatgttggtcaggctggtcttgaactcctgacctcaggtaatccgcctgcctaggcctcccaacgtgctgggattacaggtgtgagccatcgtgcccgacctaactgagatcttattctgagaatctttagatctatttatgacaaagggaaggaagggaagaggctgttgattgagctcatgatggttcccggcacagtgttttgtaatctgtctacattatcttatttaattctgcaatgagctaacaaggtatctatcccatgtcacggatgtggaaattgggtctcacagaggtaaagagacttctgcaagatttcacagctcataagcaaaagagatacactaaggctgtctgtgacctccacagcttctcaaagctagtgagtgctctttatggcaagcacttgcccacgtggtagttccaaaatgcagttcccacacacagagtctctcccgtcggggaatatcattccatctcggaagctctgtgaacagctgcagctcaaagtgcttggagctttgcaaaatgctacactgttcctttcaaaccccaaggtctcttccttgtagtgtaagatagcaccagagctgggagcatttatagagtgctatagtgtagtcctctcattcagctgatgccccaggaggtgaggcccagtggtgctgggcccccagatctccccgccagttagaagcaacaggcgtgtcagtccctggactctcagaactgtttcccggggagcgcacaaagacagatatgcttgcgtttcctctgcaactcgggaagagattattcctctggctagggggatttaattcagttccacagatacttactgaaagcctactatgtgccctgccaaatatctcagcttgtttgggcaagaaactctggcccacacttggacatacagatctgacagggacaagaggaggagcttccatacttcaaggctgtttagtaccttctttttccgtccgttctgtcaccactcatgtccagcctttccttcaagaactctaaaggagaaattatgtctcaagtagctgtgtgtccagggtttccagactcctgaagaggtgtttttttgtttgttcgtttgttttttagacggtgtcttgctctgttgcccaggctggagtgcggtggcgcaatctcagctcactgcaacctccgcctcctgggttcaagcgagtctcctacttcagcctcccaagtagctgagattacaggcgcctgccaccacacccagctaatttttgtatttttagtagagacggggttttgccatgttggccaggctggtctcgagctcctgacctcaggtgatccacatgactcagtctcccaaagtgccgggattacaagtgtgagcgactgcgcctggcccgaacacagagttttaagtacctaacttgctaactggggaacaaaccagcagatgggggagggagtcagggtctttggaagatacctactgagggacagggctgaggggaggaggcagagtggcagagggagtgatttggggaggcactgctacgtggaggtggtgccctgccttcagctttggctcagcagggcactcagaacatgaattacagccgaaagagctccttggaaggcttgatcgttagccatcacgtctttcacttaaggaaatggaggcccagaaaggggaaggatgttatttgcagcatgagaggaattggagtctgttctgctgactgtctggtcaggtccttgacacaaaaccaccgtggcagtagaggccagggtgtcctggggagccggcacagcccacttcctgccttagcccatctggcccgggatgggctggctttggctgttggaggtatttgtggcagtggcaatccaagagagagagggtgtcattttagtgatgccagagatctcctgcagccccagcccctcattctcatttggagccttctttgaggtcttgcttaggccggggagttatggcctgtggcttcaggttgggaatttgccactgtagaaaggcatcacagtacggagaaaagtggcccagctttgaagccatttgacttgggtctgagcctgacctgaccatagctgcatgacctcccggctttctgatccagtttcatcatctgtaaaatgggccgaataatacctaccttgagtgaagatgaataattatttatataaagttttttccccacaaagtagatgcctattagatggtacccattaatcttgttttatatacccttattgaggtgtaattgacagacaaaaccctgcacatacttaaattgtacaacttggtgagttttgacatatgtatacggtcatgaaactatccccacaattaagctaatgaacataacgattacccctaaaagtgtccttccgagctttatccctccttcctgcccccttccatctcctgccctccatcctcaggcaaccactggactaagctgctttctcacactataggttcgtttgcattttctggagctttatgtaaatggaattatacagcatgcatttttttttcattcagcgtaattattttgctgttcatcaatgttgtgtgtatcagtagtcctagttgtggatataccacaatttatttatccatttacttgttgacacacatttaggttgtttcaaattttggactattaaaataaagccattagaatcatttgtggaaaaaaatgttgtggggacataagtatttatttctcatgagtaatctcctaagagtagagtggctgggtcatgtggtgggcgtttgtttaacttttaaagaagctgccaaactgttgcctagagcacgggtaccattttatatcaccaccagctgtgtactagaattccaggcacttcacttccttgccaacacttggtatgatctatctttttctttttctttttttctttcttctctttttcttttttttttttttttttgagacagattctcactctgtgggccaggctggaatgcagtggcgcaatctcagctcactgcaacctctgcctccggggttcaagcgattctcctgcctcagcctcctgagtagctgggattacaggcacctggccaccatgcctggcctatttttgtatttttagtagagacggggtttcaccatgttagccaggctggtgttgaactcctgacctcaagtgatctgcccgcctcagccccacaaagtgctgggattacaggcgtgagccacagcgcgcagcccatctttttcattttaataggtgtatggtgatatctcattgtgtttttttgtgcattcccgtaaacactaatgatattgagcttcatttttatgtgctttgtttgccacctggatggctcctctggtgaaatgtttagatttttttacccatttaaagaaaattgggttgtttgtcttcttatgattgagttgtaaggtttccttatatattctacagataagtcctttattggatatgctttgcaaaattgttctccaattctgtggcttgtacatgacaggagatggaagcaagtaagctaattattgcaattcagttgaataagtgctgtgcacaggaagtgcagaggaagagcggtgatctcaggatggggagtcaaggaagcttccttaaggagaagctatatgaattggatcttaaaggaaatgaaaagttatctaggcgagggaagggtagcctcagtagaagttcgtatgtgccaaggcatggaaacaggaaacgtcgtggtacacacagtactatgaataatttgacctggttggaacaccaggattttggagcgaagagtctgaactggaatcccagttttcttactggctgggtgccttttctttttatttaactttttatttggaaacgattgtagatgcacaggaagttgaaaagatagtacagagactcctgatgcatccttcctttagtttcttgtttcttcttacataattatagtacaatatcaaaaccagccatctgagattggtacaacatgtgtatagtttgtgtcattttctcttgtgtgtaggttagtataggcatccctagaatcaagatagagaactatttctttttcttttctttttctttttttttttttttttaagacagagttgcactctgtcacccaggctggagtgcagtggcgcgatctcagctcactgcaaccaccgcctcccaggttcaagcagttctcctgcctcagcctcccaagtagctgggtttacaggtgcctgccaccacgcccggcaaatttttttttttttttgtatttttagtggagacaaggtttcactgtgttagccaggatggtctctgtctcctgatctcatgctccgcctgcctcagcctcccaaagtgctgggattatagatgtgagccactgcgcccggtggatacagaactattttatcatcaaaaaggtcttccttgtgctgacccttttttgtcaccctgcccccacctctgtttttcacttctataattttgcctttggagaatattctctaaataggatcatacaatatacaaccttttgaggttggcttttttgcactcatcataatgcccttcaggtctactaaaattgttgaatttatcaatagtttgctctttttgttaaattaccgaatagtattccatggtatgcatgtatcacagtttaattgtttgcctatggaagggcattttgcttaatttcagtttttggctattacaagttaagctgctatgaacaattgtgttctgatttttgtgtggacataaatttttgcttctctgatataaatgccgaggagttcaattgctaagttgcatggtgagcatattattttgtttttgaagaaacggccaaaccatttcctagaggggctgtatcactttacatgcccaccagcaacataatccacttcctccacatgcttgccagcatttggtgttgtcactttttctcaactttagctgttcccttgtttttggacacggagtttcactcttgtcacccagcctggagtgcagtggtgctatcttggctcactgcaacctccacctcccgggttcaagcgattcttctgcctcagcctcctgagtagctgggattacaggtgtgcgccaccatgcctggctaatttttttgtatctttagtagagacggggttttgccatgttggccagtggccagtctggtctcgaactcctgatctcaggtgatccacgtgcctcggcctcctgaagtgctgggattataggcgtgagccactgtgcccccccaacgttagctgttttaatagatgtgtagtgatatcttattgtggtcttaatttgtgtttccctaacagctggttgtgtgcctctctttctgctcccccagtctggctgtctgaatctagaccacagcctgtactccttaagtgttggaagcaagaagatttggtgctgacaaaccccctcccatcattttcagagctgccccaggaatctgacttccttgttcttcagcccagttcaccagttataggaaatctttagtcattgtcctgggtagcccatgaaaagtgatattttatagagctgtgtatttttccagggaggattgtttttgttcacagatgagcaaacatcctgtaagtgctgatttttcactgtgctttccaccctgttcctccctggtgccagcgtgccaacatctctacttactggcagcctagttgaagaaacctctagagttggcccaggaggactgttttctcagtgtttagagatcatacagtgccaagggcagctgccatggcctcaagccttccctagctcagcatcttctactctttcctcttacagatggagaggcaacttcaatgcactggggaaagaaacgaacaatgacagtgaatgatgatattgcacttcttatggaccaggctctaagtgttttatgtatattaattcacttaatccccatgacaaccctaagaattgggtacaatttataactccattttataaatgaggaaacaggcatagagaggtctcatagctagtaagttggaatttgaacctggggagtaggacacccaggtctgtcctcttagtcattatgctatgctacctgctactttcttactttctttttttttttttgagacagggtctcactctgacacccaggctggagtgcgcctgggagggatgtcatctcactgcaacctccacctcccgggttcaagtgattctcatgtctcagcctcccaagtagctgggactacaggcacgggccaccacacccagctaattttttgtgtttttagtagagacagggttttgccatgttgaccaggctggtctcaaactcctgacctcctgtgatctgcccgccccggcctcccaaagtgttgggattacaggcgtgagccaccatgcccggccactgcttgttactatgtgtacattacctgcactagggtggatagaacctcatgtggcacacacatgacgccacataacacggctcatgtgttcacagtgcccagcacagaagcatgcacatagtaggtgtttatttaaaaaagttgattgaatgctgaatgagtgagtgggcactcttcactgacgaactggggtaaggcacatactccctgtttgatttcagtgtagcactgccctatagctgggcaaacaccttggtgtctccccttaggagcatgtgggaagaagaggaggatttgccatgagctttctctgggacaggagcagtttgggatgttgagatgggaaatggagtattgagaagtgagtgtatttccagggggaatggagaggtctttggagacctgcattggccatgggctccccagttgtgagtgggctcaggctctggatcaccgctgggaagatacccttctatttatttattcattatttttatttttgagatggagttttgctcttgttgtccaggctggagtgcaatggtacaatctcagctcactgcaacctccgcctcctgggttcaagtgattctcccacctcagcctcctgagtagctgggattgcaggcgcccgccatcatgcccagctaatttttatatttttagtagagacagggtttcaccatgttagtcaggctggtcttgaactcctgacctcacgtgatctgcccgtcttggccttccaaactgctgggattacaggcgtgagccactgcgcccggccctcttctgttttctgagtctcctgtgcactcagggctggctcacatatactgcaggaagaggcaggaggaggatgacacaggggactggaccttggaggatagcacatgattgcactggccctcagattttcaaccccctgcctgtgcagcagtaaccttgactgcattgtagagactcccatccacttcatctcacccttgcccatcaggggtgtctgggaaagagaggtttctagcctgacagatctgagttccaattgcaatgcctcagttgcctcacctgtagacagagcaataataatagctggtttgtagattgttgtgagggcaaagtggagaagtgtcttagggagtgttggctccctctcctaactctttgcctctcctcctctcctggaggccctcttcatgaacacccagctgtagggcagtgctgcactgaaagaaaacgggacatgtgccttacccaagttcagtcagcgaagagtgtccattcactcattcagcattcaatcgactttttaaatgaacacctactgtgtgcttgcctctgtgctgggcactgtgaacacatgagccatggcgcttgacctcctgtagcatgtgagctaaagagagagagacaaatgctaattaaatagtaacacaatcaaatgtgaaaccgtgaattgtgggggttgctgtggaggaagctctgtggtgttgcgtgaatgaaccacagcctgggaagccagtggatagatacttcctcgggaaagtgatttcatcctggggtttgactctctagctttgggccactggagaggccagtgtggaagattcagtaggatcagtccactttatgctatatcctgactataggctgaccaggcgcctggccaccccagggccctcaccccgcctccaacagcctagaccgttccttgagattacccatatccaaccatccacaggtgctgccgatactgcaggaaccgactgagcttggatcccacaccttacagacccggagcatcttttctgttgtttatttttgggttagctcataactcactttatcactcagccgaacagtgagccaccatggaccatggtggttttgatcatcatacagatatttaaagacaactttattgaggtacagtttatattccatgaaatcaacccatgttaagtatacaattcagtgattttttttagtaaacttactgagctgtgcagttgtcaccacaatccagttatagaacatttccgtcattagtggggtcagctttagatgcaaaagacaggagaattatttttgtttttatgggattagttctgtgctcccagcaggaagatctcattaattaattaattaattcaattagtatttactgagagcctggttggggggggggcgcccacagcagggttgggtgcaaagggaaataaataaataaacaagtggtgggggctgcttcactgtggctgatgagcttccactgtcaagtgtagcctaacttgcctgctcaggtggggttcatggcagctgcagggcaggtttctgctttctaccctgtaactcttattggaaggcaaggcaaaggccttcttttgcaatacctggtattgcagtgaattattgactgagcagacagagagacgtgtcctcgccaacatctacaaatagctctgggctttggcaggcctggatgcaggatcttggaaaagaggagcgtgggtctgctgtttacagtgcaaagatttgacaggtgaaattggggcgagggtgcgctgagggaggaaaggagtgcaggcaacgtcagggccggtggccagggtgaatccagggaagcgggtgcctgtgtgcacggtgggtgttgcttggaggctggggagtgagtgggagtatggccttgtatactagactgagaggcatttgcacttaatggagtaaacatggaagatgcaatttcagtgtctgaggaggagcttaatgattcagagctggacttcaggagattaatcttttgtgagaagataagcaagggatgggttgggagactgttgtgagggtcctagtattagatgatgtggacttgacttggacaggggcattgaggcaaggaaagaagaagtgcaggggagagaaagttctgccaggtgatggggagtgattcttctctgtccctgaggttcgtacctgcctggccatctgccttttgctgttcaaccagtctccctctgcctgtccacaactgaacttccccacagtgtgttcttccatggcctctttgtactctcccatccacttcttccctcttgttctacttctcttgcccaggaggaaggagaggatccagcgaaagagatggagagaaacagaacactgtacccatgaaaggcagtgccagggcaggcagtggagagagacttccagagagggtggctggctgtgccaaacgccacagaagtgagtgaggctggcactgaaggaggtctgggggactcacgattgggactagggtgagacctcccttacctcatcccaatcctggccctgggaggaactggggacctcggagaaagcattagtttacaacaaactggaccaagtgtgggactgtttcttctgaggacagcctcccagcctcccataggaaactgcctgcaactgctcgggacccactggtctccttcttccccaccccaagacagcccctcagggtctccacgggctcgctagagttcctgcacacagtttcaagaccacagatcaaactcacctccctgcatcctaccacagagaactctgagacccagcaaagtacctgacttgtccaaggtcatccagtgaggtgtgaccttgtgggtctttcctttgctttcctttgatttctcatcttcagttggtttacgctctccttttattcacctcccccaaccttcccctcctccgtaagaattggaaacagagagttgatagttgaggtctgatttatagctgaggattgaggtcaaatttgtagctgaagattgaagtccatttactgagtgcctacttctaccaagcattgttttagaggtgtttacatacatcattttatttcattctttttttttttatttgagatagcgtcttgctctgttgcctaggctggaatgcagtggcactatctcggctcactgcaacctccatctcccgggttcaagcgcttctcctgcttcagcctcccaagtagctggaactacaggcatgtgcccccacacccggctattttttacatttttggtagagacagggtttcaccatgttagccaggctggcctcaaactcctgacctcaagtgatccacctagtttggcttcccaaagtgctgagattacaggcatgagccactgtgcccggccttaattcttataagaccctttcaaagtaggtgtcattaccctattttcctgatgaagaaatagaggctcctagagactgaatggcttgcttacctttgtatagttactaactggtgctgctggtttatattctctccccacgcatgtatttcttcagtcactcatatttacctagtgctttaatgccaggcactgttttaggtgctgataccatatgaataaaggacacaaaaatcctgccaagaccttctccatttgtggcttgcttgccagaggagatcggcttgttctttataaagtctcctgtgctagatgtctcagggctgggtatagcagctgctgtgtttattggctattgctgagatgaaattcatgacccgatttgctcctcagccagcaaggcatgtggacttctttctgtctgcttccgggggtctctgaagccttctgctgaaactgcccctaggcgagatagtttattctgtaaggagtgtgactgtggctccctcccccacggcttctcccccatttctttgcttttatcaccagcggtttcccttagccaccaccgctagcagaaccctgatttagttccacgatttagccctgataaaggcgagctattttggcttcctctgccctaagccccagggagaatttggactcagtgttttcacttgtcattttagactgttggccagagtttgcggaagaaggcctgtattattaatgcccttgccgggaacagctgcaccctgccaggttgtcatgtgagacctctgaaaagctcagagctacaaggcccacagctctcctgggcccactgggtcaggtgggaaatatgatcctacagaaactgcaggcagccaaggagggcggaaggcaacttggaaggaactgatcagtctcacgcaggagacacagccgtcctctgagcgcctcaggagggctaattccatcccgtgcctccaggggcctgctgtatttgaagatcttttagcctgagggattttatcacatcatataaaagacacataaaataaaaatgaagatattaataatcagtttaataatatttagagagccattattccttgtagtggtcactatcctcatcacttgaaatagttttaattttcagtacaagcctttgaagtgaatgggacttgttattgccatttaatagataagaaaacagtctcggccgggcgtggtggctcatgcctgtaatcccagcactttgggaggccaaggtgggaggatcacctgaggtcaggagttcgagaccagcctggccatggtgaaaccccatctttactaaaaatacaaaaattagccaggcgtggtggcgcacacctgtaatcccagctacttgggaggctgaggctagagaatcgcttgaacccaggaggcagaggttgcagtgagctgagatcatgccactgcactccagcctgggtgacagagcgagactccgtgtcaaaataaaaataaaagaaaaaagaaaaaacagtctcagagaggttaagggaattacccaaggttatgccaggtagtaaaggtagaggtggaatttgaacatagtctatctagctggaagctcctgcccctttcaggatgctgtgagccactagacacatcatatttctctgactcctcctcagtttatctgtgcagttggttcccactcctctctctccacgttactctgttaacagcttctggagcctggtgttccaggagggacttgaccagagttcactatctgctgagccaggggttagctgggtggatggtggggctgcaggccagaccaggagccagaaaagatggtctctggcaccctttcctttattcacggaaatggcccctcttcacctcttcgtgctccatcaaagctcctttttagtgctgggagcacaccacggagtttagagaaaacaatctaataatgttatttgcttgcttagaaaacctccaccagtcccagttgcttgcaggataaattgggactagaaatacctctgtctggagcagatgtcctgtcgaagaccatttctcatcactgcagcccttataccctgtcccacctcacagcttctccccatccctgaacacaatgggccactttcatgactgagcctttgcactgctattctctgttgggcatgccttgctctgcttggtgaactcctgttcaaacttcaaaacccaggatgaactttaccttttctgacttctgacttcctctagtagagttggcaccacctcctcggcccttagtttttaatgctttacatgattttccacccactagtttatggtcttttctctaagacctcagcagcaggagctgggccctatttatttctgtatcatctgtatttggggcatatttgtgtgaacaaatgaatgagggctcattgtaaaacaaactgtatataaagtgtgagtcacaggtggccccactttaactgaaatgttaggttaggttgggggaattcagagaaaggagaggtgataccctgaggcctagcgttattgattagttgaccagtgagctatgcactctgcctggagcattactgcaaatgagcctaggacctattgagagaaggtcccaggggtgaagtaacagtgggaggccttacagttgggaagtgaagcttaggtcttccctgttctccaggccagactcaaactctgtgcctgatctgcttcccaagagaggaactccttgggcagacctggagaaaaagtggggattttggatggtccccaaaggagggtaggggtagaagaggagtcgaaacagagacaggaggaagtccaagacaaactttccttccttaatacatagtgctcgggggcatccttctggctgtagcatctgcgtaatagctgctcctaagaatgcaacgtgagctgaattcaaacatgaatttggagccagtacctgaatatgtgggttgttctatgccaccgggccccctgcctgtttaatttctccttcccctgctgccaaggcttccgagaagttgctgtgtaggtgcttaatgcttcggagatggtcaggtatgagtttaaatcctggtctcgggcactttaattgctaattgtgtagcactgagcaaaaataatagggatgcagcttttatagcaccaatcaggtcagtgatgttggtgatactgttgagagcttactatgtgccaggcattatgctaagtggttgatgaccattatctcatttattcctccgtataccctacaggcagatgctgtcatcattctgaaattccagatacgtaactgaggttcagagaggttaagtaagttgcctgaagccataaaacaaacgatgatggaatcagatcatggatcctgatatgtcacaccttaaccattgtgccattggtctacaatttgcctgatcctaagaatcacctgagactcttgttaaaagagcaattcccaggccctgtctcagattcagattcagcccagctggggtggagcctggggagcagtggatgcagcgggcaccctggatgatactaggatctggcaagtttaagaaacgctatattgtgccttcctgcctgtaagttgtggctcatggttggccctcaagaaatgttagctgttagtattataatataaatgaattgaaaggacagcttattgtgaaagaatatacgtctttaaaaagcttattagtcctgacactagattttaaagatagaggtcggatgggcgcggtggctcacgcctgtaatcccaggacttttggaagccaaggcaggtggatcacgagatcaagagatcgagaccatcctggccaacatggtgaaacccattctctactaaaattacaaaaaaaaaaaaaaaaaaaaaattagccaggcaaggtggcaagtgcctgtagtcccagctattagggaggctgaggcaggaaaatcacttgaacctgggaggtggaggttgcagtgaggatcaccccactgcacaccagcctgggtgacagagactccatctcaaaaaaaaaaaaaaaaagatagaagtcaaggggaaatagattctggatcaatgaatctatactctaatactctaaactcaaaactatctgcaagtgggatgtgtgcctttataggtccctgtcactagtggtcaagcaatcagtgccatcacgtgttgggtgtgatggctgagctgttcttcagggacccattcctcagtcagtgtctgctgtatacatgcagctgcagaggacatttgtgcactgaggagggctttgggtgtgttaatattctagaagaggtggagtagagcagctatgcaaagcaaggaagaaggcaggaggtgttaaaagaaaaactttagagaaaataaatgtagcaaagttcatctgagcaaagaaccatgtgtgaattggacagcactcagaaccagaagaggttcagagagctctgctgccgcagtgaggacagtgagcttttgtaggctgaacgtggaaagaaggctaagaaaatatattttattagagtgggaagaccctagttagaggttagttggtggtttctgattggtgaagcctctagttacattttactgtttacattgatttggattttggtttgcttatgtagaagctctggttatggagacaacctcaggctaacggcctccttcttatttgctttaacagagggatggcagaggtagaagacagcagatatttgagggccatcactactgccttgtaccgtgggtaacctgcatgaagtcttctctgtagcttcagagcatctagatccgctgtcatgccaccaatacactaaggcacttcattttcctcagggagactgatgatgtcttgttatctcttattagcattccaagtcttatcttatttttgaattctcaaggtccatttttgggcatataaattactgaaggcagtcaggaaatattgttccatcagagctgggagaaagactcaacccttatcctggtccattgacctatttccaacctcagctttgatgacaaaactcagcagaagctttcttacagactaagagcactttataaaacactgcttaaagctgaaggaaaccctctgaatgaccacccttgaatacctcctttactaagacccatgattatctgggagttagaatccataataatagctgccactgtgcacagtgattgtgtgctgggtgctttacatctattttctcatttaattctcctaacaactctatgatagcagtcacgctatgatacaggtcacactggtattgtttcacaaatgaataaacgggcctagaaaattcaactagatttccctaggttagcagtggagttggacttcaaacctaggtctgtgtagctcacaaatgaacacttattatgcttataccattttgcctcattagaataataggaagtccttccttttttggtgaggaagaaatttagagattggttaccctgactggtgatacagagcaaagctatgtacaaattgcatcaaagggtggcagatccctacattcccatctaacatcacatcattcctaacctttttccatgtggataagcatgaccttagtcaagtcatttcttagtaagatagattgttggttgctcgtgactctcagtgaagacccagtaatgccaagaatcatggcagacagttagggggaatatgtatcttcaactatggggcagtatggcaaagatattgagggccaggaatttgactacttttgaggagcgatgacaactgagtacaggaagtgagaggaagggagcatgtaccgtgtatcatttaatcaaccttgagcttgagaccaaagggaacataccctaagtttaactaggatgggtttatccagatataatggcatcacatcgtaaattgaaaagtgtctgtgtgtaattctctctgtcttatttcttcgagaaggagtttcgctcttgttgcccaggctgcagtgcaatggtgtgatctcggctcactgcaatctccgctacccgggttcaagtgtttctcctgcttcagcctcccaagtagctgggattacagtcgcccgccaccatgcccagctaatttttttatttttagtagagacggggtttcaccattttggccaggctggtcttgaactcctgacctcaggtgatccagccacctcgtcctcccgaagtgctgggattacaggcatgagccaccgcgcccagccccaattctctctttttaatagtaatctaattacatttatttggctgctttgttttctgtctcaggtacgctaagtttgtctctcaaaactctttgtgggcaggaattgtagtttatatggtagtgatggttgtattttaatttcacagagtgtctagcaggtaataattagccaataaaatgtttccattcattcaccaaatatttactggatagttaccacggtttgggcactggacataaaggtgctagggatacagtgataattattacttggcagttgaaatgcttacggttttaagggaagacagacatgtaggcacattaaaatgacattttaatttgattagaatataattgagatttaagtaaaacttattgggaactcagatgggaaataatgagaaaacaaagagagggaggcagatttaagaaatattctgagagtagaaaatagaagcttgcgacctattcagttggaatcaacactgtttataggattgctctaggggcagtgaggcactggcgtggacagtgatccaggggcactcagggtgagggatgagttgaatatgaggtgagaaaaaagggaagttgaagataccaagcttagcaaggtagtaagaggtggagagaggaagggaggggattataatggttattatatagggagtgcttattactatgtgcaaggtaattaacacgaattgcctcattttttcctcataataaaagaagtaggcacttttggggatacagacactgagagcagttgagtagcctgtccaagatcagacctttgaggagtggaggagttaggtttacgcccaggaatccttgctccagagtaaacagtcatgcagctgggtggagaaaaattccactagctgatcaagaacatccgaaaagctctcatgctgataactcccaaatatggatctccagctcacaccttctccctgacctctagactttcctatcaggcttcctactttacgctctgtttgacagtctcatctcaaactcagaatatccaaagctgaactccagatttcctctgcccccaggtctgctcttcctttgtctcctctttttccattaaagtagcaccatccgtctagttgcttgggctccaacccttggaatcatccttgactcttctctctctcacactcacatctaaaatatcgggcatgattttcaaagcacgtctaaaatatacccacttctctgcctccactgcaaccagctggtctaagccatgagcatcgctcactgggactgctgctgtctccttactactatccctgccccctattcctgttcccacatggcagcctgagcaattctggcatattaagtcagatctggttgttcctctgctcagcctcctgcagcagctcctattttatttgctaaaagccagagttcttgccaagacctcaaaggccctgcccagactcctccacctccccgacatcgttgtttgttcctcccggaccccgtctccatgtaccctcttccttgatcctttccttccaaccagtgcacaccagtgcactcctgccttgagccttgccgcaaacacgcttccccagatattgtgggactcattcctccactatctgcaactctttgttcaaatgtccccttctcagtgagttctcctctgactgccctttggaaaatggaaacctacctcaacccagtacttccgatctcccctttctttccttcccttcctcccttccttccttccttccctccctccctccctccctccctccttccttccttcccttcctcccttccttccttccttccatccttccttccttccttccttccctccctccctccctccctccttccttccttccttccttccgtccttccttccgtcctttctttctctctttctctgtctctctcttttctttctttctgagatagggtctcgctctgtcacccaggctgaagtgcagtggcacgttctcggctcactgcaacctccacctcctggattcaagtgattctcctgcctcagcctcctgagcagctgggattacaggtgcccaccatgacacatggctaatttttgtatttttagtagagatagggtttcaccttgttggtcaggctggtctcgaactcctgacctcaagtgatccgcccacctcagcctcccaaagtgttgggattgcagacgtgagccactgagcctggccctatcccccctttcttgtactctactttgttctctaagcacttagcatcttttaagataccaaataatttttttaatttgttatatttacggctcttagtgtctccctctgctagtatgtaaaactctaagggtgttgatcttcatctgggttattcactgtagtatcctatgcactaagaattatacttagcacttagcaaatgtttaatacatttttttttaaagtgagtaagcgtagaatataaagcttttgtgcaggtctctaaaagtttttgaaaggatatgatctgaggctaggcactcccagcactttgggaagtcaaggtgggtgcatcttgagctcagaagttcgagattagcctgggaaacatggcgaaaccccgtctcttcaaaaagtaaaaaaaaaaaaaaaaaattagctggtcctggtggagcatgcctatagtcccagctactcaggaagctgaggagggacgattgcttgagcctcagaggtggacgttgcagtgagccgagattgcgccactgcgctccagcctgggtggcagagtgagaccctgtctcaaaaaaaaaaaaagaaaaaagaaaaagaaaaaaagacgaggtctggagtctgagggagatgtcactgggggctggtcatgtggaagcaggaatcttccccgtgtatgtgggcatttcaggactggcaggaagctggtcccaggggaggctaagctggggaggatgcctgaaaggcattagtgggagggagtttgaaaaagacccagagacgcctgtttgaaataagtattggaaaggactctttagattttgcaattagaaaggcagtttcagtggaatgatgtgaaccgacttcagttatttgaggaaccagtagaaagtggggaagtgtaagcaagtcaagagaccccgccataaggaagcagagattaggttgccgtttgaggaagtgatttgtttgaggtatttttttttagctccacaaaatatcatgtttcgggtgtgagtagggatggggtaaatgacacactaagctaataacatccaaaccagcttgtgaaacatcgtgcaagttatatctggttcataccaaagagtcgctactcagtccaggcctctatcatgcctggcacatagtgttgaatattgtattcaataaatattcaacagtaaatatttgttgaatacagtattaaatactatagaatttagacaggtccctgtatcaacaacagcaacaatgaccaccaccaccaccaccaccaccacaacaaaataacaagaatgtccaatgtagggggttgctttttgatccacttgcctttggctagtggtgtctttctctccttagcgccatattcttcagcacttttcggcagctgtatgtggttctattttggtctcctctttactgcacggcgattatgttttcaagaggcaaatcttcagggtgactagagtgacacgttatctgagttctggatggaggtaaaggaatatcacggtgagtctggggaagcaaggggacaagagagttggccaaatgaggcggaaagaccccagacttgcgatcagaagaacctgatgtcaaatcagatgcatcttatagcaagtcgagccacctctctgaaacttgaatttaaatgatctaaggtcatttcctttggattttatagaaagaatagtgtcaggagaaaaagaaaaacaaggaaccatgacttgctaaacatactcagaaccaaaggttttctttctttccttttaaaaaaaagtgatatacagtgaatacaggcttagttccctaatggtggcaaatgatgtaatgttcacagatgtcctgggggaaaacagaacaatcaacttctattttactcttaccatttctgagagaagtcaggcagactgcataggaaaggaaggaaagaaagaaggaagggagggagggaggaagaaagagaaagagagacagggagggagggagggagggaaggaaagaaaaggaaagaaagcaaggaaggaaggaagaaaggaaagaaaggaagaaagaaagaagaaagaaaagcccctaaggttagtaagtatcttatgtccctggaactacgctaggcacatacataccttaccaccttccttatccagtgaagggtattacatcagtgttttaggtaacctacccaaggtccacagctaacaatggggagagaggatacaacaagcctttgggggagaaaattgaagcccacggcccacaagaaataaagccaagaaatgtagttgcttaaagtcagccagattccccagcacccagcatagtgtcttattcttaggagaatttgagaaatatttatttatctaagggatggttggttggttgaacgaattacctgaggaaacctgaaaatgttttttgctgaagtgctgttgaaggtcctcaagatcttacggagatgggagaaacctagggggagagaaataaaatttaaattttcaaaaggaataattataaaccaactgtatcaggcagtaactgagttgacctatggaaaatgcatagcacatggtagtactcaacaagtgataactatgatatttaagggaattattattatcattaaataaatatgtttctgctgctgcttcttatgctagaacttgagacacagagttattggggctcgtatttaaaagcactttagtttttctgtatgcataatatcccatggtgtaaggtaacctcttttccagttggcagtcatgcctagcttctcatacctctgctttagttcctgtttgtggtgtcggcacagtaaaatttatatatggccatatagcctatatgttaaagaccatcccaagtatctcctcagtggtcaggcatttttgtatgatacagaagcatacactttaattgacattggttgtggtggtaattaacttaaaactcttcgattagacagtgaacatctttgtatcctcagtaacaggatttctgttctcatagacgacatggtaaatgtggactggatgatggttcagttggtttacacgtagggcttctggaagtgtctctaacgggtgctaatttgtgttggtcatggggataatgcttcctcagctctaacctgtgatttagattaacacataaagggcttgttgatcacactgacggaaaatttgaagctgagaggggtagaagctattgtatatgccagaatcgagattccctataaatttaacagcttacaggaaggactgagtgaggaaagacaggctgcaccaatataaatgtaaagacctagctgtaggctccaaataccaatggttaagccaggctgtgtgtgtgttttggggtgggggggtggtggtgggggcgggtggtggtggggttaaggattaggacttgtaagaaaagttagtgaggttatcagttgctcacactctgtaatcccagcactttgggaggctgaggtggggggaatcacttgaggtcagaagttcgagaccagcctgggcaacatagtgaaatcccatctctacaaaaattacaaaaattagctggaggtggtggtgtgtgcctgtattcccagctactagggaggctaaggtggaaggatggcttgagtccgagaggtggaggttgcagtgagctgagatcacaccactgcacttcagcctgggcgacagagccagagccagaccctgtgtcaaaacaaaaaaccaaaccaaaccaaaccaaacaaaacaaaaaaaggctagtgcacctgatttcaactaagtgagaatcattaacatgaagctactaaaaactaaccagaaactttcagtatttgcatcgtagaggtgtagtcattcctcttgttttacagtaattgggtcacacctggaactgagcttattgtcattcttttaagagtgaggggggcaaatggaaataggcccagaggacaataaacagaaaagttaggagattcagaaaccatattatctaaagaatgattcaaagactgagactatttagcttgaaaaagagaaggtttagaagagtgccatagtcttaaaaggttgttttttggaaaaaagaacagacgtttgttagaaccaggaaatggatacttaggggaatggggaagagttcagtccaacgtataaaaacatttcttaattaatattttgctctctgcagacaggctgtcttgaaagaagggttgtcattattacagatgtggaagtagatgctggctggccactttttgttgctactgagtgggggatttttattcatcagatagaggattgggctgatgtccactaagatcttttctagctgtgatggtgtgttgctagacctcacagagcatgaagccctatgcaccatgttcgagggaacctggataacattgttggcaggctagtgggagctggcagaaagcttgagctttggatgcaaagctaatgattaaaagctttgtgtatttgacttgctgtcagcatagagaacatatcaatttgagtttatgtaagataattagtattccaaggtgcccaccaggtagcatttactatttgaaaaatagcagaataactgagggcatttgattttgcatgtcttctcccaagggatctcagggaccctgtggacctcctggatgtccttccagcactgctccagcaaggtcccggtcaacactcttacttcacaggaacccttccttatccacccttatctgtaggggcagtctttcctctgggtgctgtagccacaagctttggagttagatgagttggtttgaatcctagctctgtaccagctccatgaccttgggcaagtggcttagttcttgactgcgtcttgctctgtcgccctggctggagtgcagtggtgcgatcttagctcactgcaacctgtgcttcccaggttcaagcgattctcctgccttggcctccccagtggctgggattacaggcacattccaccatgcctggctaatttttgtattttcagtagagacagggtttcaccatattggccaggctggtctcgaactcctgacctcaagtgatctgcccgccttggcctcccaaattgctgggattacaggtgtgagccaccaagcttggcctaaagcttctcatctctatctattgaatgcaggtgactcatttccacctgccagattcttaatgatcattagagcgagagaaactgcccagcagcacagcactagcatgtgttcatgttcagtccatggtgttaatatttgtgatgataggcatagactattgatagacttgatgactatattcagtcatctgtgggtagctacttggtgtgaagaattccttggctggggctgaggagagttctctacctcacctcaaccccagccgccttctcccatccctccctcttagaccaatcccttcctacaggatgttctttttttttttttttttgatttcctctaaaaaatttcaataaagaaaataaagcaggaggtagaaagcaggagaatcgcttgaacccgggaggcagaggttgcagtgagccgagatcgtaccattgcgctccggcctggtcaacaagagcaaaacttcatctcaaaaaagaaaaaaaaaaaggatataaaccagcttctggcattacccaggagcagctgacctagatgcttgttccagtaagttctcctcactccctctcatgcttgtccgcctccccacctcctccacccctgcttccaggctgtctgcagaccgctgggccgggtttcacagtattggcgtgaatcagcttgccaggcttctaccctttgtgcttggtggtagctaactgacttttttctttttctcatgtggtcaggatttttccactgaagcatttcttttatgatgtgggagagacagatagcacctggctagttgccttcttttggacttgctgtgatttgacttttcagccaggccaggtatttattttcccttgggtggagtgtggttctcccagagatgcctcattcatgattcatttgttcagggcatacaaaaggcatttcttaggacctaacctgggcctagcggtgtggtaggtgcctgggcttcagagaaggctaggatggttgctaattctctgaaaggtcatgccctaatagaggaaacggacatagaaactgtgaggggcgctgtcttggggtctgtacagggtgctgtgggagcacagggaagggttcctaactcacactggggatcagggaggctttggctcctgatactaaatgacctcttatttgatacactttttatgtcagacttgctggttctttccacacattgagtcaaagggtgtctctggttcctccctggatggactgatacaggccatttcactcactctcccaagggtttatctcctctggcctctccgagtctcacctggaggtgtgtgttcctgtggcgtgggttccttgggagcgtgggtgattcaccggctggcctcatcccatactgatcctctggggtgatccctattcaccttgtctcctttgctgtcataactccactgctgggggcagaggtggagatgttgagcttgtgggcaggaataagttccactgagccacagagcttgactctgctcaccttcccacaatagaactcagagttggaatcctttccccagccacctcccctcccatctgaggacagagggtaacctgcccgtcatctctggggttatctccaattttcagtctccctcatctccagctgacctcccatatggccaaatcgatcctgaggttgggaatccagttcttcaaactgagcccttcagactctgctgtggtacgtgaaaacagtttcagtatcccgccataaataccttccaaaattctaaatgtagtacatgaccattgatatggtttggctgtgtcccacccagaatctcatcttgaattgtaatccccatatgtcaagggagagaccaggtggagggaattgaatcatgggggctgtttcccccatgctgttctcatgatagtgagtgagttctcacaagatctgatggtattttaagtgtttggtacttcctcctgctgccttgtgaggaaggtgccttgcttcccctttgccttgcaccatgattgtaagtttcctgaggcctcccaagccatgtggaactgcaagtcaattaaaactctttcctttataaattacccagtctccggcagttctcacacagaagtgtgagaatggactaatacaatcatgaccttaaaaaataaataaataaataaataaaacatggccgggcgcggtggctcccgcctgtaatcccagcactttgggaggccaaggcgggtggatcatctgaggtcaggagttcaagaccagcctggccaacatggtgaaaccccgtctctactaaaaatacaaaaaaaattagctgcatgtggtggcgggcacccataatctcagctactcggaggctgaggcaggagaatcgcttgaacctgggaggcagaggttgcagtgagctgagatctcaccactgtacgctagcttgggcaacagagtgagactctgtctcaaaaacaacaacaacaaatatttgaggcctacttttttgagaacagaaaagcaaattagacgtggtccttgcccctaaggtgctcacagtccactatctatctaggtcagatattttccactgctggtcagtgtttatgaggcaaactgtttactaacttgcctaacactgcctgtcccgtgcagttcttcctggattgacggcagctagatcctgtgacagaggacagctgttccccgctccctcccatcactcccctcctctgtctcctggccatagctgtgggctgcaactctgacttgagtgtttgtgtccctagtgcgtttagcttcgggtgggggctgcctttgcaggtactcgataaacacctgcatggggagttgaaataacaagttcttaaaggaatctaattcgagggcacactgctggtgggccctgtttggtggcccttgggctgagcacatgctttgatagttcactctcagaaacatccagtctggttcttaagtggccagaatgacccgatggagttaagatttcccgtttttggcatagggtcacctgtacgtctttcattctaaacaaaaaagtcaagcatgtcttgtcctgttctctcaagcgtgttagcgagatggaagacataatggtggccagagaagctggaagcaaaactaaacagaggtgcagatttgcagaagctaccccttggcatcacggggtgcagtttttctctgcttctcagttagataacttgacagagttttatttatttatttatttatttatttatttatttatttatttatttatatgttttagaaaactaagaggcctaggtaaataactgtgccttaaagcccttctttccaaccaggagtagcagcatgctagaaaagaaaagggtgggcctgggaaactagatttgaattttggttttgtcactttctagctgtgtggtctttcgaaaatcatttgattcctctgagcttcagcctcttcacctgtaaaataatcaacccacagcattactcagaagatttacaataaaagagaaaacctagcacattacgttatgtaagcgatacttataacaatgatgataatgataataatcatcatcataataacaattgaatggtgggctctctgctgctgcatgtaggtagacatggctctacttcgtcatcagagagggtctctgtggcctgaagcactcggcaggctccttgccttccacatatttctatgtgttgggatgagattgtcttcaatccttaaatatcaactagtagaagcctagtacagcttcaccttggaggagaaaaatatgtcgattcagctctactcagcaacttttttaaagtggagagattgagagagaaagagagagtaattgaaataatgcccacagttctgacagcctcttgatcagctgaaagcccacaagtgcaggtggggagacatgaattcgagttctctcagtctctgtagggtgagcagcttgttggtccaggtgtgatcccagtatttaaatgtttgtctttttagtgtaacatggtagtaaactgaagacaattacttcttctggtgcacatcctgatccctttcagggctggagtctaacacagctgtgttagattcactgagtgaattttatatgagtgttcagggctgtataaacagaccatatattctgtatttcataggtgattcaaagtggggggactttttgtttgtttaactttcatttactgcacatgaatagtcatacaaaataagatgttattttaactgacttcaaattcagctgtttattttttcatttttgctgtagatatttcagtatgtatatttaaaagatagagaccctttaaaaataggccggggcgcagtgactcacacctgtaatctcagcactttgggtggccaaggcggccaaggagtttgagaccagcctggccaacatgatgaaactccgtttctactaaaaacacaaaatttagccaggcatggtgggcgcctgtaatctcagctacttaggaagctgaggcaggggaatcgcttgaacccaggaggcggaggttgtagtgagccaagatcacgccactgcacactccagcctgagcagcagagtgagactccctctcaaaaacaaaaaaaaaagagaccctttaaaaataaaaactacaagatactattatcacattcaaataagtaagtaagtaagtattccttaataccagatatggagtcaatattcaattttcctcaattattatatatatatgtgtgtatgtgtatatattagtgtttgagtgtatgtatatagatatgggtgtgtatagttttaaaatagtttgtgtattcaaattaggatccagataaaatccaagtgcaatagattgataagacctttaagattgttaaaatgggccaggcatggtggctcacgcctgtaatcccagcactttgggaggcctaggaaggcggatcatgaggtcaggagattgagaccatcctggccaacatggtgaagccccgactctactaaaaatcaaaaattagctgggtgtggtggcatgtacctgtggtcccagctacttgggaggctgaggcaggagaattgcttggacccgggaggtggagcttgcagtgagccaagattgcgccactgcactccagcctgggtgacagagtgagacaccatctcaaaaaaaaaataataataaaataaaaaaaaaataaagaaattgttaaaatgcaggctgtgcatggtggcggctcactcctgtaatcctagcactttgggaggctgaggtgggtggatcacctgaggtcaggagttcgagaccaacctggccaacatggcgagaccccatctctactaaacatacaaaaattagccgggtatggtggcttatgcctgtaatcccagctactggggaggctgaggcaggagaatagcttgagcccgggaggcagaggctgcagtgagccgagattgtgccactgtgctccagcttgggtgacagattgagactctgtcttgagaaaaaaaaaagattgtttaataaatgcttttaatcaataacttcccacgggcggggacactgatttgaaatataatctttgggtgaggtgtgtggctgccctgtctctgtataggtagacacaggcccacaggtgcagtggccatattatcggtgcgtgtttactcccatcgcatgtaccattcctctcacaaacacctgcttcctgatcatttgtctttttaaataaaaatatgatatttgagattcttttattctctttaaatatttgaatacagagtctatttgaaggaccagtatattgaatagcagtaatatttgaaggactagtcagctgtagaagccttgacttcagatcttcacccaagaaactctgtgtatttgcttttcctgggccactcagatagacaattgtgtttttgatacagtaagagtttgcagcttagcttaactagaaataatccggatcttattttggaattaggaagaaacatgttatgatgtagaaaagcctgctctgttacctacatgatggcatagctttgtgcttttcatgctttgtggccttggaagggggtagatagagtgtaggtggttaggagttgtttcctggctaaaaataggaacagcatactgtgagacaggagcttcttctctcacaagcctctgtgcaaatagcggagggttacgcatttgctgcaggtggtacttaagctccaagaacttacggcacacctgcttgagtggatcatgggtgagctggagaacctgaagtagcaaaggcaagaaggcaacgacgttccatctgtggaaggacctaccaaccaggtatctctggtgacagggctcatctcataggtggcccactgtacatcataccctgatgttttctttgcatgacgtgctatagaattccaggctcatgcacacctttctgctctcctgttttgcaaatgtctgcactctagagtccttcctgttggccactacatacgtgtcccccgcttcttgcccctctctgcttgggtccctgctacactggtatcctgcactttccaccttgtattgccagtttgtttccaaggccatctccactttgagcttgttcatgaccacctcacacagcacacttggtctgtgtggtggtttgaggggttctgtctgtacactgtgctttggctgtgttggaggcgggcaggtgggaaggaagaaatgtattcttggggagatttgtttttagagacatgagacatggaaaatagttaagtaataatataatatgggaggcatggactatcagaggaggcaggcaggactgcccaacctcctcactgggcacgttacgctacttcctcctgacctctatagtcctttgcatttatcaagcactgtcatacgtgttatctcatgcaatgaccagggtgtcaccccctgttttgtaagtgacaaaactgtcactcagagggatgaaatgacatgctaaaggtcatctagttagtaatggtggaatcagggctggagcccagtcttctaagcctagttcctattctgctcttcatcatctgtctcaggatggtaaactgaggcctggaaaggagaaggaactcacccagcctaaagattaagggttttatgctggccacggtggctcatgcctcccaacattttgagaggctgaggtgggaggattgcttgagtccaggagtttgagcccagcctgggcaacatagtaagaccctgtctttacaaaaaataaaaaaaaatagccaggtgtggtagcacacaccagtagtcacggctactcaggaggctgaggcgagaggatcacttgagcctgcgagatcgaggctgcagtgagccgcaacggaatcattgcgctccagcctaggacagagtgagactctgtctcaaaaagaaaaaaaaaaaaagattttagacagtgctgaccatattgagacaatgctgactggtgagtggggacggagaaataaagaactaacattgtgcagaactgtgttctcagccagtgctatctaatggaaatagaaagcaagccacaagtgtgggctgcatacgtagttttcagatttgtaatagacacattaaaaaagcaaaaagaggccgggcatggtggctcgtgcctataattccagcactttgggaagctgaggcaggaggatcacttgagcccaggagttagagaccagcctgggcaacaccctgtctctattgttatttttataaaatttaattgtttaaaaaatacgggaagtaaaaagaaacagatgaaattaatttaaacaacatagaactacacaggggttaagggcactagctccctgtgcagttgaaagtccatgtatattttctgaaagtagactctgaaaaataagaaaaagaaagaaaatccacgtataacttttgacggtccctaaacttaatacgaatatcctgttaaccagaagccttactgataacataaaaaactgatgaacacatattttatatgttatgtgttttatatactgtattcttgtaataaagtaagctagggaaaagaatgttaggaaaatcataagaaagagaaaatgtatttattatttagtaagtggaagtggatcctcataaaggtcttcatcctcatcatcttcacattgagcaggctgaggaggaggaagaggagggattgggtttgtttcaggaatggcagaggtagaaggagggcgagggggaggcaggagagacaggcacacttagtgtaacttttattgaaaaaatctgcatataaatggaactgtgctgtttaaggatcaactgtattttatttaactcaatatattcaaaatactcttactttctcatgtaatcaatataaaattacgaatcatactttctacattcctttttccataagaaatcttcagtgtgtatttttacacttacagcacgtctcatctggcctagccacatctggctagtggctgttgcattgtggagcccagttctaagcattttacgtatattatttcatatagttcaataatcacgtgaaaagtttattacagaactatctaatggttgaggaaatgaagcccagagaggttaggtaacttgcctggggggcacgaagctggaaagcaacagaactggatcctggcctctccctcctcttcccactgtggccaactgccagccgaccaggaagggggcccgggggcaatgcaggggtatcttatttccaaaccattgttaaacttgctcttgtggaggcagctggccctggggaagtaaagggaatcctcctttttaaatgcatatgcgaaagttaagggaatcctttcactaggcggtaagcctctgtctagggccgtgggaccattaacaccactcgcctcgtagaaggtgtgtgtcattcaaggtgataatgcataggaacagctcagctatgtcagggccaggccattatgggtgctgaataaatgtgtttctgtcccctatgctaaggcaagacatccggggaagaagtaggcccggatttgtcgccttgaaggaagactactataatctcttttttttttttttttgagacggagtctcactccgtagcccagactggagtgcagtggcacgatctcggctcactgcaagctccgcctccctggttcaggccattctcctgcctcagcctcccgagtagctgggactacaggagtgcaccactgcgcctggctaattttgtatttttagtagagatggggtttcaccgtgttagccaggatggtctcgatctcctgacctcatgatcctcccgtcttggcctcctaaagcactgggattacagtcatgagccaccgtgtccagccaagactactatattctaatggagggtaagtggagtaggagggccatgtgcgtgctctgggggcaacaaacttggtgctaaacttgtttttcttgttttactcacaaacattatgacagcagtaaagatacacttttatttatttatattttttttagagacagagtcctcctctgttgcccaggctggagtggctattgtagttcactgcagccttgaacttgtgggcttgggatcctcctgtctcagcctcctgagtagctgggactataggcgtgcactatcacactgagctattttaagaacatttttgtagagtatgttggccagacggatcttgaacctctggcctccagcattcttcctgccttggcctctcaaagtgatgggattcataagcatgagtcatggtgcccagccaagatacatttttaaaatgtatcctgcctcctgacacattactgttcacttgtaacaatggtcacttgtaatcatagtctgtttgcaaagcaagcttttaatagaattacaattttagtgttgaccaaaagtttattttgggccggatgtggtggctcacgtctgtaatctcagcactttgggaggctgaggtgggtggatcacctgaggttaggagttcgagaccagcctggccaacatggtgaaaccccatctctactaaaaatacaaaaaaaaaaaaaaaaaattagctaggcttggtggaggtgcccgtaatcccagctactcgggaggctgaggcaggagaatcgcttgaacccgggaggccgaggtggcagtgagccaagattttgccattgcactccagcctgggtgacaagatcgagactctggctcaaaaaaaagtttattttgtttctataaacattgtttttcatctttatagtgcatgtcttttgttaatggcttcataggcaatcgatggacttctggatcacaattttgcttgttcctatggctagatatttaggttgttccaaattttctcagcattacatttgatgctacagtaggcacccacacatttatgtttcttttctgtttttcaactattgttggttgttctgaggtattttcgtaaggtttcacttctgttttcccagccatgagtgatacatgagcacaactgttttgctattaatcaccagcattgggtgtgaaaatttactcaaagttttgctaaatttaactggagtagaaatgggccatgcatttgtgcgtacttccccagatgctttttagaacagtgcttgtgtaactgaccagagtgtcaggtgaggccattgttggcagaaaggtgccttcctcgggagaaggtgggttacacagcttttctttgcagatgaatggtgagagccaaacccgaagacccacaggtttcaagctggccatgtggcttcactaagtttggcctcaacttcccacagtggcacagaagcgaggtagaactcagtgttcctacccgaaccctggacattctgaaatgtccacagcccgaggaaagggatgacctgcatgtcactttccataccctccactgcacatagatctgtctcaggcattgaatcagagggatgtgtgactttggacaaattattttacctttctctgcctcatttcttcatctaaaatcaggtgacagcaatgtctccctgtaatattgcagtggggattaaatctgttaatacttgaaaagtgctgagatcagtgcctggcacataagtagtgctcaataactgttgtaaacctgggtttggatctcacttccattgctttctggaggcccactttggtcaaatggctgacctttctggacttcagcttcatctgtaaaatgggattatggcatctacttcagcatcatgttaggggtttaagtgagaaaatgcatttcacacagtgtcctgcacataaagggcccaccatatatgtaatgaaaaacaaacaaacggccgggctcagtggctcactcctgtaatctcagcactttgggaggcccaggcgggcagatcacgaggtcaggagtttgagaccagcctggtcaacatggtgaaaccccgtctctactaaaaatacaaaaattagccgggtgtggtggcgcgcgcctgtaatcccagctactcaggaggctgaggcaggagaattgcttgaacccgggaggcggaggttgcagtgagccgagatcacgccactgcactccagcctggacaacagagtgagactttgtctcaaaaaaaaaaaaaaaacccaaaaacaaaacaaacaaacaatgtttttagctttattttctactctaccaaagagagagctttgttgccttatattggtgttgtaattagctgttagatctgaccatattttctgttatggtgtatttttaagtccacattctaggtttaaggccatcttgaaacaaatgggaggcaaatcaacattttcgtgtgtctgaagcttttaatgtaattttgttttggagatgaatgagctcataattccacaaagaagggatgatatttcatatacttattagtttagtgatttccctcccacacttagtgtcaaactgtcaggtttatggaagctatcaaatgtttctttatgctcagcagcacagatcaaagttgtctacatgataaggtaaaaaacatattctttaggaaatgcaaagaaatgacccaaaagacccttgagcacagctcattcctctccctggtctgtccaactttccctcaggaaaagtcaatgtagtcattatgtctggaaaatgccaaggacttctttccctcattttttacatggccttgcactctgtgaggcattggctgggaggttcattgtggctttcttgccgctaagcatctcctctctgccaacatctcatcaattcctgtctgtgccaattacctttgcttaggatttggggtgaggaaagttgtgtgatttgtctgtttctgtttctgggtaaaatctcaactctgggcgtatcagcagaaagggttctgaaatgtcccttgattcagatgattctgaatcaatagcatgtatgtgtgtgtgcataattacccttacccagaaaattctccattataattctttaaaagcacaggttcacaaattattagaaagtatattttgtatactatttacggtagcaaaatatcaaatgcaagaagcaagtttaattaaagataggcaagacattttactgaagaatataaaacattagtaagagaaataaaacaatggcttatgcaattatggaaactgacaattaccaagatctgcgactggcaaggtggaggcccaggagcagcaatggtgcagttccagtctgagtccaaaggcctgagaaccagggaaagccaatggcgtagttctagtgcaaatgccagttggcctaaggcctttcagtttgagtccaaaggcagggggaaaaaaaccccaaaaccaaaccaaaccaaaacaacaacagcaaaaacaatgccccagctcaaggcagtcagacaggaggagctccctcttacctgtgggaaggtcagcctgttttactgtattcaggcctttaaccgattggataaggcccaccgttagagagggggcaatctgctgtactcagcctgctgattccagtgctaattttatccaaaacaacctcattgaaacacccagaatatttgactaaatatctgggtactctgtggcgcagtccagttgacacataaaatcagccatcaccatcaatttgggggaaaattgacattttaacaaaattgaatctttcagttgatcagcatggtatatatcctccatttatttagatcttttattgctctcactagtgttttgtagttttcagtaaaaagtcttgcctatctttaattaaatttgcttcttggcattggatactttgctactgtaaacagtatataagatatattttccaatgatttgtgaaattttgcttttgaagaattataatggagaatttttaggagaaggataattgaaaatccgtcagacagcagtgaagtttaggaactaccattctggacataaccatacatcattaataaaatattccttacatccctatgctactttattattgccaaaacatttttttttcctttggtcctcgtaagggttcttagaaagagacagaagagctattatttctactttcatacaaggaaatgtggcctcagggattgatgtggtttgaatatatgtccccaccaaatctcatgttgaaatgtaacccccagtgctggaggtggggcctgctgggaggtgtttgggtcatgggtgtggatctttcatggcttggagctgtcctcacaacagtgagttctcatgagatctggttgtttcaaagtgtgtagcaccttccccaccactgcctcttgcttttgctttcgccatgtgatgtgcctgcttctgcttcaccttccaccataactaaaagctccctgaggcctccccggcaagtgagcagatgctggcaccatgcttgtgcagcctgcagagctgtgagccaattaaatctcctttctctgtaaattacccaatctcaggtatttatagcaatggaagaacagactaacacagggagactatctgaaagtcctatgactagcaagtggcagagccagccccagagcccaggacttttcctaagagagaggtcctgcttctgataccaaagtttttctatagaaagatggccttttataagcattactgagaagatacctccaggtgcccaggaagaatctcctgcttgtagcctccataggcagtgtaggaggaagggaagaaaacagcagagtggaccaaggtagcaatatgtaatacactagagtcgggagcgagaatgatgtcctgttagcttatacggcactttcgtgctattaagaaaggatgccctttcagccagtaccagatgccattatgcagtgaacaacttgtacagtcatatgtgacatcccagagagaaaacaacaaatacagaaaccttacttattcaggaattaattattgatgaggaagctaaattggtgtttctttcctttagagaaattgattgaaaatacttcaagatgattcaaagctaaaagagaagaaatcatctttctttcttctcccttttacaacctttctatcttctatcctttctctttctcctcttcttcctttcattactcagcacttattgagtgccagggcatgaaaatgcagagataaatgaggtggcatctctccctaggagcttctaagtcttacaaacgtttttgactgccaccatcaataagaagtacattttatggtattgcagttttttttttaggtctttcttttttaaggtttttatatattgaaacatttattaatgaaatgatgagttcaggatttgtttcaaaatctagggatgtaggcgtaagtggggtatacacaaaacaggactgaccatgagttgataatactgaaactggtcatgggtctgtggggttcattatctgtcatccatgtttctttttctttttctttttttttttttttttttttttgagacggagtcttcgctgtttcgcccaggctggagtgcagtggcgcgatctcggctcagtgcaagctccacctcccgggttcatgccattctcttgcctcagcctccccggtagctgggactacaggtgcccgccaccatgcccggctaacttttgtattttttagtagagatggggtttcaccgtgttagccaggatggtctcgatctcctgacctcgtgatctgcccgcctcggcctcccaaagtgctgggattacaggcatgagccacggcgcccggcatctgtcatccatctttctaatgatctatttgagacaaaagtttcatgaagctctactttctcttattacatgcagtggattctgatattttaaaatcttgtttattctctttttaaaaacctggtccttgtgcccaaattgcttttgagatccactgatgtaaaataatacgtattttgaaaaacactggtgtatcgagggagagagggacctataaaataattgattactgtcaaccagaaagtgctactagaatatggtcagagggctgtgggagcacacagaagggaaggaccgaccaacagggtcctggggagtctgggaaagcccttcagtaacttgcatggaagaggagacataggcatctttgacaagatggtggggggatatctgaccttgaggatgagggaagtggtgcaagtggggtgagccaacctgagttcagtatggctgcaatgtgagggctgttggggagtggcaggaaatgaggttacagatagcagcagcagcaaaagtcactagtcttctgggacagcctaaggaatttatattttatctgtgtttcagggaaccattggaggataaactgagaaatggcccagttccatttgcctcttacagagatcattccgtcggctccttgtagatagaccagtctacctctgtggtctgatttagaacataaaacctagacccaaaggagagccagtctggaagccagatctaacctacctcatgtaatcatgtccccactctgccacatgacttctcagatctacacagaacacaaattgggctttttcaagtatttatcaaaacaaaaattatggtcactttcaggacataggaagaggtgaaaatagagccaattccctgtgtgctcctttccccttttccctgcatagggttctctcatctgtagagttacggcaacctgtgagagattcatagtaatcacctacagtgtggcatttttctaggtgctttacaactattaactcacttaatcttcataataattctatgtggtaagtattattattattaatttcatagatgaggaaactgaggtaaaaagaagtaagtgatttgtctaaggtcacacatctagcaattagcagagctggaattttggcaatctggccccaaagtccacttttaaccaccattgtgcttcttgattaagtttgatttcattccagtcatctccttagactcagatgtttgaacaaagagaatcgtgaaaaaaatttggctttaagttttattctcaagattgccaaatccctttcttccctaatgagaggaagaggaaagttttctagctgggagaaaaaggatggcttcttagaaggaagtggtattttagtggagttttgaaacatggatgagaagtaaattgctgagaaggatgagttgctagtacagccaagatgaaataatccaaccacaatctctaccaatgtttacaacagaaagctgaataggatgcaaaaaaccacatgaaaactctgaaaagtaatagcaggcaggcagagtactgggttcaaaacttgaacaatgactcacgatgaacatggatttgcagaacagtgtggaaagctaagagtccgagataactccatctttctaactagaggaagcaggggggaaaagccactggaagccagagagtgtgaggaaatccctgagaggagagaggtggaaaaagggatccacaaattggactgacaaaagtcctgggcacactacaaggtgtgcatgcatggaacagacccaggaggcacagaagaggttttgagaatctaactatgatattaacaaccacccaagtcccagacaaactcttgaatggagcatgtgacagattgactcaaatggcataccaaaagctttgaaaactgatctgacactggagctaacactcataaaaagtgagacagtactttcagtctgaacctaagtggattaatttcctggtaaaacaaacaaacaaacaaacatttttcagatgatttttaacaggattcagagtctcacaacatattaaaaaatccaggatacaattcaaatttactcaatatcaaaacaacctggaaaatctaaacagtactcaaaggaaaagacagttcaataggcagtaacactgaaatgacttagatcgtgaaattattagacaaataaagtaggtatgaccattctccactcttgaaattagaaagttcttgaaattaggaaagatagaagttctcagcagagaactagaaactgcagaataatcagatagaaattttagacctgaaaagatgatatgggcccagtagcggaataaatataacagagaaaagagtcagtgaacctgaaggtagatcaatagaaagtatacacaatgaaatatacattatgaaacaaaaaaaaattggagaaaaatgaaaagcctttcatggtactgtgggacaatgtcaaaaggctgaaacttcttggtattggcattccatctcagaaggtaaaaagaaaaatactggtgcagaaaaaaatatttggagaaagagtggctgaaatagtttcaaatttaaagaaaaacgtatcttcacaaattgaagaatctcagtaatttcaaacaggatacatttaataacaactcctcagccacctcataagaaaacttctaaaaaccaaggattaaaaaacattaagagcattaaaatatgacacattatacgtaagaaaagggaaggaagaaaagagaagaaaggaaggactcaagaaagagagaaagaaagaaaaaagagaaaaggaaaggaaggaaggaaggaaggaagaaacctattcgaatgactgtccatttctcatccaaaaccatggtggccaaagacgaagacagtgaaaccccgtctttagaatgctggaagaacaaaaaaactatccacccagaattttatatccagaaaaaatattctttgggagtgaaagcaaaatagagatattttcaggtgatggaaaaccaagaggcttcatttccaggagctctcctcttaaagaaatactaatggaagtttttcaacctgaagggaagctgtactagaggaaaagttaaaacttgaggaacaaaagaagagcaggagaaataataaatatctaatacattccccttgataaaaatacacacaaacataaatctcatgacatgggtaactacaaactactggcgatattttagatttatttcctttaagtcttttttttctgtgaatatgcgtttctctttttcttttttggtttttctctctctgtctcttcctttcatgtggacatttcataacatatttaaatattcctttttgttgggatttgaggttgtttcaggttatgcatggactgaagtcaaactacagtctttggcagcatttctgataattcttttttggagatagaattactgaattaaaagaagatggacatttttaatgctttgattctatttgtgaaattgcccaccctccctcccttcttttcttctttgcttccttacctcccctctttcttcctccctttttctttcaactaagattatgtagtatatagttttataatattctttatttattcaatctatattgtgagcattttcctgttttgttaaaaagtcaataattaaaaaaacttttaagtttttaaattatttttaatggtactatggtcgtatttttttaaaggtacataattacatgtttatggatggaatgatatgtctgggatttacttaaaatacttagggataggtggctatgaataaaacattattgaccctgaattgataattgttgatgctaggtaacggatacatggtggttcattattgctactttctatagttttctatgagtgcaattttttattttaaaactttatctgagtgtggtggtgtgtgcctgtagtcctagctacttgggaggctgaggagggaggatggcctgagcccaggagctcaaggctgcagtgagctatcactgtgccactgtcctccagcctgggtgacagagtgagacccggtctctaaaaataagtaagtgaataaatgttttaaaagtaaaaactgtaagaaatgtttatgaatttatttttaattgttcaatcgtgacccattgtggctgggcatggtgactcacggctataatcccagcactttggtaggctgaggcgggtggatcatgaggtcaggagttcaagaccaccctggccaagatgctgaaaccccgtctctactaaaaaatacaataattagccaggcgtggtggtgggcacctgtaatcccagctactcaggaggccgaggcaggagaatcgcttgaacccgggagtcggaggttgcggtgagccgagatcacgccactgcactccagcctgggcaacagagcgagactccatctaaaaaaagaaaaaattataaccctttgtgtggacatttcataacatatttaacttgtcctctttaaaggaagaggacaagttaaattgtcctcttgggaattgaggttatttcaggttattcatgggctgacataaaactgcagtctttgcttctctgaatacttctttttttgagatggaattactgggttaaaagagaatggtcatttttaatgctttgatatatttaatcaaattgtccttcagagaagacgttccatgttatttttccatgagttacttaaaagtgaccttgtcagctctattgtaattttttagtctattaatttggtgggggaaagtgtatgttattattttaattgaatttcttttatttccagtgacattgaatccccagcctgtcactgaattggttcccacccgtttagggaggaggcagagacaagagtagaagaaaaatgatttatttattttttgagatggagttgtccaggctggagtgcagtggtggtgtaatgcccaaccttgtttttactaaccctgtttttagactctcccttttcctttaatcacctagccttgtttccacctgaattgactctcccttagctaagagagccagacagactccatcttggctctttcactggcagccccttcctcagggacttaacttgtgcaagctgactcccagcacatccaagaatgcagttaactgataagatactgtggcgagcaatatctgcaattcccaggaattagtctgattgataacgcccaaagccccgcgtctatcaccttgtaatagtcttaaagcccctgcacctggaactgtttactttcctgtaaccattcatccttttaacttttttacctattttatttctgtaaaattgttttaactagacccccctcccctttctaaaccaaagtataaaagaaaatctagccccttcttcggggccgagagaactttgagcgttagctgtctcttggccgccggctaaataaacagactcttaattcgtctcaaagtgtggcgttttctctaacttggtcaagtacaacagtgtgacctctgcttcccaggttcaagtgattcgcttgcctcagcctcctgagtagctgggattacaggcatatgccaccatgcccggcaaatttttgtatttttagtagggatagggtttcaccatgttggccaggccggtctcgaactactgacctcaagtgatccgcccacttcggcctcccaaagtgctgggattacaggcgtgagccaccgtgcccggagaaaaaggatttattttctcttcctcgttcttcactttgaagatgagaggcaaacacagacagatcccagattcaaatcctggctctacaacttactagttactgattttgtacctttatttttctgaccctcagattttttactgaagaaatcagtgcaatcatgaactgtgaagtaatagacatttatagagaaaatgcctggggtgcaatggtcattctgaaaatggtagcttttgttgtccttgggaagctgaggctcaggatgtgaaacaacctcctgctctttttcagaggcggcaaggagctcagagctgggttccttcacacagggaaggccccttgcaggaactgctgctggtatctgcgtcattaattctttaccttttattcttccaggctcctgtaaccatttatccttttaacttttttacctattttatttctgtaaaattttatttctgtatcttccatgccctgctgggcatgaaggcagctatcacaggccaggaaattcatgttagggaattgggtcatcttagggaactaattcaaattgctaatggtatttatttgattcagtggaaatgcaccttgcagtacttgattcggaggactgggttgaatttcgggagggtttgtttgacattgtctcatcttactctctggagcaggattcagacctggaacgctctctttccagggcaacctagccaagctatggtctctgcctcaatttattgccctttccccaggactcacatcttcctccccactcactgtttgcccaggctccggtcatctatgttagtcgtgctcttgctacacatctgccacctctttcagaaggttgagagcagccaaaacagaaacgggaactgtggctctcaataaactgtctgctcgcagaccaagagagaagcgggagtgctttgtctgtatttactgcattttttttcattttttttttctttttttgagacagggtcctgctctgtctcccaggctggagtgcagtggcacgatctcggctcactgcaagctccgccccccaggttcaagtgattctcctgcctcagcctcctgagtagctgggataacaggcgtgcgccaccatacccagctcatttttatatttccagtacagacggggtttcaatattggtcaggctggtcttgaactcctgaccttgtgatccatccacctcagcctcccaaagtgctgggattacaggcaagagccacctcgcccagctgcactttttaaggttatttgaacaccaagcaattagtgcttctgggcccaggctaacagatgaggccagaaaaccccaccacactctctcagtcctgagcaagggtgctgctgatcgggcacagagccatttctcctgaaatcaagactgggtgccaggccgtagggctgccagcctgcctgtgatttctctctgggaccatctcagtgatttcctgttttcttcccctgagcacattcagtgcaagaggtctaagcatgagggtgggaggtgcggtgagtttggcctgttttccaaatggaggggaaatccagggaagtcagcaggcttcactgtgagtcgtcgggtctaccagcgtttcctatgtcaggccgtgagcacctgctctgtggaaatgaaagcaaatcttctccaccaggcaggggctgcagagggctggcaggggtgaggtggaagggctcagggagaatttaacaatgttgtgttttcatcttgatgatcacacaaaaatgattctgtaccagtcacgaagacttcaattcataatggaggagacctttagcgtcttaagtgtttcttgaacactgtttctttttcctctttaaaatgggagctgacttaatctgtaagccttatttcttatggctctatagaagtgatgaaataacagcactgtctggagagacttaaaataacaaacatttcctctgcacagtttaaagccttctcccatctattacttcccctgtgctttcccataactctgtgaaatagggactattaagcccttttttcacatgaggaaacagagactcagagaagataagtgacttttctgaggacacacagtgatttggttggagagctggaggacctcacatctgtgccctggtttcaggctttttctattagttcagtcttcacagtgacacacccttgaccctgcctcccacgagggtcccacgttcctattctctttgctgtggagcagtgtttgaaatagctaacactaaaagtggcaactattgttttgttttgtttttgtttttgagacagggtcaccctctgtcacccaggctggagtgcagtgatgcaatctcagctcactgcgacttccacctcctgggttcaagctattctcgtgcctcagcctcctgagtagctgggattacagatgtgcgccaccacgcctgactaatttttgtatttttagtagagacggggtttgaccatgttggccaggctggtctctgactcccgacctcaggtgatcctcccaccttggcctcccaacgtgctgggattacaggcatgagccaccgcacccggccgcaaatactggttttgttgagatgaacatcaaggtctcgtgtttagccaaagataaatactgattcatgacactccggaaaatttcatctcatccttgaaaatgaagacttttcacacccaacagcggtcaagccgggcctcagccttctgaccctcctcccctgcttcctggcaggtacaggtttgccagctctcatttattaagcacctggcatgtgccaggcactgcacaatccttacttctaaccctcactgcagtcctgtgaagtaggtgcttttgcacacattttacagatgaggaaactgagaccccgactgtcatgtaatttgcctaaaattgcatgctgattaataataaagccgggatccaaatctagatttgtctgactccaagtcttggtgcaaatgaaattcagcaccattcctccaaactgagccttgtctgagggtcttttgccttctcagtcttggtctttggtcccctttagttttttctgggcccaccgttttgagctcccagttaccagcctcttgattgaattgattgacctggatggatgtggtcaaaacaggcaacttcacagctctgcctttcccaggccagcactggggtgaggtgtggggagggcaggcagcccaggggcagctctgttccttctttgggcctgcttcttacatctccatcctcctaagtccacattctgtgcttggtcagcatgcaggagttgggactgttttgaggacttgcttatgggttgtggggagggaagggcactggcatgattgcaatacattcctgggcaagacatctggcctctcccatttgcggttccttcatctataaaatgttaacacagtgtgtcaaaatgttgatgttctcgagtgacttttcctgagatctttgccaattctcaaatcaacatccttatggtcattgttgccaggatctcatttattgtgtacagtagcctaagaggaggcattttgttcttgcttgacacatgacaaaatcacacacatgccaccagagcacataattcccccttacaccgtaaatacaatcaagcacacctgaaaatctaagtgatttcttccttattgattccacgaataaaaggcagtagggatttctaaatttgttaaaggaaattcatcactgagtgtaaattctccctaacatggactagcaattttgtttctctgggagccataattcacaagccaacaggtatttctgtcacttcctaatacatggagggtacagcatcccctgcacactgggttccagcctgagtgtgaactctcttgcgtacgaagggactggcccctgtgtgcttcttactgcacgcacttcataattactccttagcagacttaggctgtttcatgtctaggaccttcggagttattctcaaaagtaaaaatcccaaatgttgattctgtaaataccaagggtcaactataatattagcaatgatccagggctgctggaggattcaatgagataaaatgctaagtgtccagcatcctaagtgtgctctgggcttgggaccttgcacattcactgaaaatcactgaaattccagggttaggtgggcatggctttggctgaaagagtcacaggtcaaacaagatgatcatcttagtacaggcattaagagtgcagtctttcctgggtgcagcagctcacgcctgtaatcccagcactttgggaggccgaggtgggtggactggttgagcccagggggttcaagaccagcctgggcaatgtgatgaaacctgtttctacaaaaaattacaaaaattagatgggtgtcgtggtgtgtgcctggagtcccagctacttgggaggctgaggtgggaggattggtggaggctgggaggtcgaggctgcagtgagctgtgattgagccactgcattccagcctgggtgacacagtgacaacttgtctcaggaaaaaaaaataaaaataaataaaagagtacagtcttggattcagacagttctgggttcaaaccttggccctgccatttactagcagaagtcctttaacttctttgagattcaggtttcttatctgtgagatggaaaggataacacggtaccggctttggaggactgtggtgagattgaatgagctgtcggatgtccagacctggcacagtgcctggcacgtgggaaccccctaggaggcaatcacagtcacttttcatccttcctttctttctgtacagagccgcagacccagcaggtgcttcatgcttgttgatgatttcagttcctgtctaaaaccattttcttgtttacaaaataaccatcttccaccccaacacacaccacaagcccccgcggtggatgccagccagacattctattcatcaagcgccacttgcctatcctgtgcttggcagtgctaaaaaggagacagagaagggatataatcttatttttctgactggaaaaataagtttcccacacgcagcacctggagaagagtgcgggagtgcaggagagtgtgtgtgcatgtcaggagtgtgagtggaagtcgacactggtggaggactcctcactgcaggatctgagaagcttcctccagggacatgggctggatctggggctgcctttggggacctaaagtgaagggaaagagtaatgcgggaggcagttcgaggttgagatgaaccattgagtgatgacttctgtggatctgtcccccaaagaaaaatgtccaaacgttggtcaacatgctccattaagcacccagaaagtgcagatataaaatgttcttcaggtgtggtaaggaggaagcaaatgtgaaaacccccagagaaccagcccctgcctcccaggaggcaatgatgtgggccaagagcagaagttgagttctggccttggcctgggattgctcagagggtagcagcccctttgcccaagagattgagctgcagccgtgttgctgcctcttcatttggtgaccaaagacaagacaagatcaccacgtggggaggagacagaagtgaaaggcccacctcaatgcaagggtgattagctctttctccagcagtactgactcactttggcctactaatcaatgtgaattcttcataacaggcgatcccctttgagtccaggaggacagagttgatgacagtgtagcctgaaattcctggggccctggattgaagctgtggccctgccatttcctcagtaactctgagctgttattgggcaacagacttcctaggttgtggaggaggctgggttaactggggactttaaatgcttgagccgtgtgttgactcattaactatgtctaccctaggctgaactggtgttgcccttcccttcccaggaaaggcctggcctctcccattctgcccaaggaaaccctctgtgaacttttacattcttccaaactattctgatgtttattggtctggatccattacatcagaagctactgagggtaatatcaggcatctatattttaaaaatgcttcctaggtgatattaatgcccaggtaagatagagcaacaatgttctaagtggttcccttcacctacaccactcaccttcatggctgtgagattaggggtgggagggcaggggagggttacaccaagggccttgaagctctcaggacagacttgaacaacctttttctcctccatgttcccttcccctttttctttgtagggggtccatttggccttggacgggttctagcaatgacgtcagtttgttaagacgagcgaggtaaacagttgttgccttggtgactttaaggagaggtagttgcacttcagtgattctggcaattagaaaatgtcaaggaacactggctcagacttcctcctgcccagattgataacacgaaaaccacgacggacatggttggaaagaacggccgcctggcgcgatccccagccctggaattcctggaggacatgatatttaagaagacattagtagacattgtcctcactaaagacagagttaaagtggagtttgaataatcagacccacgttagtaggatttcagaggaaatccttatcttcggtatttcagtagaaatcgttcctgttttgttgccatttggttctcctttgcaacttagcatgtgagaattccgggcagcctgattccttgcccatctttgacagctctgctgctgtgtcccgggggaggcaggtttccaacataactgctactctgcctttgcctggtgagtgctgagatggagaggcaggctggtatctgtttgatctgatactccagaaaaatcgtaattttacattgtttttttcctgatttctaaacacatgaaaccagattcttctggagaaacatagagtgccttaattttgcctagttaggggctgttgggggtggtttttctaagcacccttctgtgtctagccaaccagtagaacctgatttttgggaggtgaattagccagggttctctagagggacaaaactaataggatagatgtatttataaaggggagtttattaaggagtattgactcacacggtcatggaactatgtgaggtcccacatagtccatctgcaggttgaggagcaggaaagccagtccgagtcccacagctgaagaacttggagtctgatgttcgagggcaggaagcatccagcacaggagaaagatgtaggctggaaggctaaggaagtctagtctattcacattcttctgcctgctttttattctggctacaatggcagcagattagatggtgcccacccagattaagggtgggtctgccttccccagcccactgactcaaatgttaatctcctttggcaacaccctcacagacacgcccaggatcaatactttgcatccttcaatccaatcaagttgacactccgtattagccatcacaggggcatgctaagcaagaattgtgtctatggctgtaatcacaaagttacgattattggagtaagctccacaaaccagagtcccttgtccagggcctccagagatccaccagacacttgagtatctcgaaaagccagatgggagaagcacgttcaccacggcaaacctgcgcagccaagaaaatcaagtttctttgttttatgctaaacttttatcaactgactgtggtagtcgtggcaatctcatgccattcagaacctctgattggcaacagtatctttgttcatttgataacaaataactcaaattttaaattaaagttagtcgacaacatctttcaaaatcttggaatcgtgtcgggggaaacaaaatacaagagatatgatttgatgtgaaagaatttaggacctcttggctttgattaaattagggtgtgcttctgttgtttcactgggattgtgaaatgttgggatgaggagatatgaaaaatctatagctgaatattctgttgatggttttaaaccatagaaataaatattcaggaagtctctattgagtagctctatagggtaatgctagctgctagagcaaataaactcacgtcttaaccatcttggcccagaagtgatgtatgttatttttgctcacatttctttgccaataactagtaaaatgatcccatctatatgctgtgtgtgtttgtgtgtgtgtaaaatgcaatccctctctggacagtaatttacagcaataactatatggcagaaggagcaaacttcttgtggggcagccagctatccctgatatgaggaaagagaaagaagggtcagcattaagtggcagctcaggtggcacacattaagaatccaagctcttagagaaatgggagtccttcatgggagagggtttctggcagccaggacacatggagcccctctcggaggcactatgccaccctctgggggcaacagggtgtcaagcactctaagtctaagaacagaaagtttgggttctaaggtccagatgagggtgaggtttgtgcactaaagattaaggagatgaagatcagggcagagtaaataggtgtcaccagaaggtcaatacagtgattagcaactgtagttggtgtgataaagcagagaggctcgcagtagcccttggaagggcctgagtagagggacataggatgaagagcactaccagtttgttggttagaataatctggtcagccgggcatggtggcttatgcctgtaatcccagcactttgacaggctgaggcgggtggatcacgaggtcaggaattcaagaccagcctggccaagatggtgaaaccacgtctctactaaaaatacaaaaattagccgggcgtggtggcgggtgcctgtaatcccagctactcgggaggctgaggcagagaattgcttgaacctgggaggtggaggttgcagtgagccgagattgcactgcttcactccagcctggtaacagagcgagactctgtctcaaaaacaaacaaacaaacaaaaaacaaaacacaccgtggtttcaccatttacagtgacatcttgagcaaatgacttaaactctctgagtttcaatttctttatttaaaaaagaggattgttaataccccaccccacagggtggtggtaagaattaaatttggtaacatctataagacctgctgttcattacagttgattcttaaggcagcatccggtgatgcctttgaaacatacatcggcaaagtcttaatcagatgaaagccaaaacccctacacctgtgtaaggcgccacattatctggctgcccctgtgtaggtattttgctgttccctctacttgcaaccctcttttctcagaaatctgcatggtagcctccttcatctctgttaacagaaaaaccaaattctgtaaaatattttcaagaagtttatcctgaggcaatatgagttactgtagcttagagaaaacacaaacccaagaagccttgagtgagtggccctgaggcagttgggccatagtctggttttatacattttagggagacaggcattacaggcaaggatatctggaaatcagtacatggaaggtaactggtagttctgtccaaaaaatgtgagacatctcaaagtgggggagggtgcggtgttaggatatatgtattggtggtttttttttttgtttttttttgagatggagtctcgctctgtcacccaggctggagtgcaatggcgtgatctctgcccactgagcctctgcctcctgggttcaagtgattctcctgcctcagcctcctgagtagctgggattacaggagcatgccaccacgcccggctaatttttgtatttttagtagagatgggatttcaccatgttggccaggatggtctcgatctcctgacctcgtgatccacctgccttggcctcccaaagtgctgggaatacaggcgtgagccatcatgcctggactatgtgttggtttccatgcatgtttcctggcgcatagccccatagcccttgctacagtcttgctagaatgctgggctttttagacttcagggacaggccctaagaaacagtctctctcctgccgtcctttcacctgccccaaggcaaggtttttatgttttctggcctgactgtgggccttacaaccctcccatgaggccaggcatagtggttcatgcctgtaatcccagcactttgggaggccgaggtgggtggatcacctgaagtcaggagttcgagaccagcctgaccaacatggtgaaaccccgtctctactaaaaatagaaaaattagccgggtgtgatggtgggcgcctgtaatcccagctactcgggaggctgaggcaggaagaattgcttgaacccgggaggcagaggttgcagtgaatcaagatcatgctactgcactccaacctgggcgacagagcgagactctgtctcaaaaaaaaaaaaaaaaaaaaaccttcccatgagaggttcctaccctatgccctgggggaagaaatgctgacgtcaaggaagcttctataaaaacccaagaggacagggttgggtgaactttctgatagcttaataggaggaggttcctgtagggcggcacaaccagggagggcgtggaagctctgcatcccttctcccataccttgctctacacatctcttcatctgtatcctctgcagcatccttgatgataaaccagtaaatgtaagtagggtgtttccctgagttctgtgagccgctccagcaaattaattgaacccacggagaggggaaccccaatggaagctggttggtcagaaagaagttctggaggcctggacttgtgactggtggaggggggatgtcttggacactaagccctcaatctgtaggatctgacactatttccaggtagatagtgttggaactgaattagaggacaccaagctggtgtcgctgcttggtgttggggtgggacccccacacatatggtcacataagtcatcttctgtgttgattgttgtggtgtgagagcagaggaaagatggctacagagagttttccctacacagggacttggggggtagagggttaggggagggctgaggggccttacaagtcttaagtgcgttttagggattctttagctaacagtagctgagagagtcaagttattgtctagtgacttgaagtcagtaggaaggaatgcctgagtaagataaggaggttgtgggggcctaggtccttggagcctcatagatagcagccctctgggtgaatagatagtgattgtctcttctcagacctttgggtgtctgactctcagttagaatctctcctagatctgggaaaggcctagcaagggaagagacattaatatcgattctctggagatgcacgtttcccccaccaaagatggctttgcagtccaaaggctgtctggcagccttttccaaatatgtcaaagaaatgtattttggggcaaaatattttaatttccttcagagtctgctgtctgtcatgtgatactataccagagtcaggttggagagtaagccacattttactgggttaattaaaaaacccatttaatgagactgtattgtttctagggtatgacttaatctttgccttttatggccttaggtattgtgtatagtttggtatcttattgtcataaagggtctgtttggtcagtcttataatctctattttaccttaatgctggtcacttgtacctaaaccccaaaagggaggggtatgatgagggtgtaacctcctttctgtcatggctgggaattcagtttttcaggtttctctggggtgcccatggccaaaaaggagtccattcagttggttagtggggggcttaggattttatttttggtttacacctccttccaacccttgctcaaatgtcttcttctcagtgaggctttctctgatcatctgatttaaatctccacctcacccactccaagctgtccctatttctcttccctactctaattgtctgcatatcagttatctccttgcaaagcaccacggatttatgttgtttgactctttatttatcctcactataaggtgagtgctggaggggttagggatttctggctggcttctctactgctgtgtctgcagtctggttcacagtaggcaatcagcatttgctgaaagaatgaacctatagcttggaaccaacccaaatgtccaacaatgatagactggattaggaaaatgtgcacatatacaccatggaatactatgcagccatgaaaaatgatgagttcacgtcctttgtagggacatggatgaagctggaaactatcattctcagcaaactatggcaaggacaaaaagccaaacaccacatgttctcactcataggtgggaattgaacagtgagaacacatggacacaggaaggggaacatcacacaccgggactgttgtggggtggggggaacggggagggatagcattaggagatatacctaatgctaaatgatgagttaatgggtgcagcacaccaacatggcacatgtatacatatgtaacaaacctgcacgttgtgcacatgtaccctaaaacttaaagtataataataattaaaaaaaaaaaaaagaatgaacctatcgcatgagtattggtgtaagttttcttacaggccccggggccaccacaaagtagaagaactcaaccttccctattcatttcctcacctccaactcccttagactaccaggacttagatccttttgggtatatatatacatatatatgttttatatatatacatatatacatgttttgcttgtttgtttgttttttgagacaaagtctcgctgtgtcacccaggatggagtacagtggcatgatctctgctcactgcaatctccgcctccaggttcaagtgattctcctgcctcagcctcctgagtagctgggactacaggtgcatgcctccacgcctggctaattttttgtatttttagtagagacgggggtttcaccatgttagccagatggtcttgatctcctgacctcgtgatctgcccgcctcggcctcccaaagtgctgggattacaggcatgagccaccgcgcccagcctaaatgttttatatatatatatacacacacacatatactctatatatatatacacacacacatatatacacatatatatgtgtatatatatatatatatatagagagagagagagagagagagagagagagtatatgtgtatatattttaacaaaaaaagcctgggagaaccattgaatttgaaaccaccaaatctcaacaagccttgaaatctaacactcagtttaaggaaacacagagcagagaggagaacattaaacaacaccctgaggaagccgtgagccaggctcagaacataagccactccacaggagaaatgacttcattttttcaacaaatatatgccgtggaaaagaagaagtaagggagcgaggaactcttctagataagagagaattgaaaatggcacatcatccagtcatccaaacaaaatgtcctgtccttgtttggatccccttttgagcaggttagtgtaaaagacattattgagagaattggtaaacatttaaaggtgggttggatattgggtgatattggcattgtgatcatattgaattattatttatattcatatattctctggcagaacctggtgcgtgtgtgtgtgtgtgtgtgtgtgtgtgtgtgtctgtgtgtgtgtgtctcacagtgtagagaatctgagggtctacgttctcaattctcccaggggtggtacgattctgccaggggtggtacgtaggtaattctcgatgccatgggagttagttgatgcgttgcatacaatggaggtcttaggacattaaggcttaattttttgttggatccgcagttgggaagagctggtagcaggaaactgatacaaagtctggcgtttgctttaaattactccaagaaaaatcgaagcagtgtagtaaagattaggaggtgagacagttcctctttctgaggagatggcgggcccgttttcttctttgtctggctctctgtagcataggggtgtggtgtagtgtagggatgtggaggaaagagtgggtagctgtgttgctggggaggggtgaagtgttttttccactctctatataggcccttcctgcgctctcctctgcttaatgctgatttaccaagcggagtgcaaattgtgtggtgagcatgtgggagatgcctcctggggctggggtgtgtagtggggagtgggcattatacagaaagggaattcatggggcacgaaaggcctactttttgccaggcacctgtcaaataggaaggcagatatttctatgaatacaagtctgtctgtctgtgcatggggtgcaagggtgaagacagtagcaaatggctcatgatttccctttgccatggctgtgtcaatctggagttcagagctctcctaatcagttccgagtggttggctctggtcagggaccgcagcctgacctcatggtggggacacaacaccccccaacaaagttctgttctccagactcttagaaaacctctggggaaatgtactcagggaaatgttctgaggacttcattatcagtgctgcctggctgggaaaagatgtaatctctggtaagagacccttggcaggagtgaaagccctttatcttcagggctttgctctgggcaggatctccccctccccaccatgagccatgcaggtgggcctgtcctcaggtaaacacttgccaacagtcacagcctctcaggcactgcgcgcccctcatggcttcctttctttcactgtcttctcagattcaccagctacaagtcggtttcttgttgcatatcatgcttctgacctttgctgcgcttttgagcaaaacggtgacttgtcagaaatgttttgacaaatgattaatgttttgacccatgttggttcccgcttgatagagctcggtgggtaggagctggggtggtagagccagacagcctgggcaggctcctctggggactctgtgaagcacatggtgataacagtgctcgccttgggcactgttgttgctgcaggaattaaatgagcttcaccaaattacaggacctttactgcctgtaaattacttagcacatagtaaaagctcattaattattagctaaaataaagtgataaaaatctatcattaaattgtcagcacagccctgcagaggcaaccttttaagtattgttatccttcgcagatgaagacacaaggttcacagaaactgactaattggcctaagataacttacagtacaaaagccaggatttcaatctagctttttgagactagagcctgagtgaactgtttctccaaagccaaggcttctcaaactattggtggtgaagaaccaaattttttttcccaattcctctcacatcagtagttacgtaaaatacaataaaaatggggccaggtgcggtggctcacgcctgtaatcccagcactttgggaggccgaggcgggtggatcatgaggtcaggagatcgagaccatcctggctaacacggtgaaaccccatctctactaaaaacacaaaaacaaaattagccaggcatggtggcgggcacctgtagtcccagctactggggaggctgaggcgggagaatggagtgaaccctggaggcagagcttgcagtgagccgagatctcaccactgcactccagcctgggcgacagagggagactctgtctccaaaaaaataaataaataaataaaaaataaaaaataaaataaacaaataaataaaaaagcatggattccagaatcatgaaatgagaaaaaggacatttgaaatacaagccccattttaaaaagtattgatctaacaggcataaaattactctttaaaattactgtaaaagtcacttacactccatttctgtacttttctcatcttgcatcttgaaaagctttctcagcctagcacttctctgcagatctcactttcagtagcactgttctcagcgacctgtttctcaccacttgcctgagaattaattacctggggtgcttattaaatgcagatttccaacttccccccaatattctcccaacctcccagactacttgaatcagaatgattgagacagaattcaggaacccgcattttaacaagtgattttaataatttgggtgtgctctaagtctgagaatcactgtgctcctcagtgttgcctcctctctacagataacagataagagggtaaatagtgaagtgagtgcagtgttttattccggccccccttcttgccccgtcttcttttctcaaaaaaaattttcaaaggcttcctttctgtagaagctcactgacagaaccgactttccggactcagtgcacttcaacaaacaggtattgagctcaaactgcagggggctgggtaggtggagagctgaccgcaagatgctcacaagcagtagagggtgagtataggtagagaaagggcaggtctagggcatttctgtgcataaagtggggcagaagagaaggagccagcaacgagaccagtaaggcattaccggtaaggcagagaaaagccaggagaagtataggttttggaagctaggtgaagaatatgcatcaaggaagaggaagttatggactgctgatgagctgaataagatgaagactgaacattgaccatttggttagcaatgtggagatcgtggaggtccttgtgactctgacaagatcaggttcatggagatggggaggcctggttggagtgggttcaagtgagagtgggaagatagctattgcaaacaagactatggactgtctttcaaggagttttactgtaaaggaaagagaaataaggcattttaaagaagagaaatgaggtcaagaggtttagggtcagggcagggaagtggagtttatttagaactcatgcaataagtggctcaatatatgacttctctaaagtcatatatcttttagttaattccttgagtaaaacagaaacaattgtctatcgtgacttttttcttcaagctctttaaaactctccccactcccaaactatatcactgtctaagaagaaaggagtttgaaaatcagtcttgttacatagcttaatttgaatacatccaaaaaatgacattgcattattttcatatttgctgaatctattttttggctggagtattttaaagtagatttttaaagtagatttcatctcttactacttcacatgcataggactttttctttatataaccacaatacttttatacacctaacaaaattaacaataatttcttaataccatataataaccaatctatgttccaatatccccatttgtccccaaggtgaatcaaaccaagattcagacaaggtgtacgtattacatattattatatctgcgaagccatttgttttttattcccatttacttgttgatgaaaccagttcagttgtcccataggaagtcctaccttctggatttgtctgataattttcctttggcgctatttgacttgttcttctttcttctgtatttcctaaaaactggaattgtgtatgacagcttgataatatacagattaaacattttgggcaagaatttttcataggtggttagcagggcgtggtggtgcacgcctgtgatcccagctactcgggaggctgaggcaggagaatcgcttgaacctgggaggtggaggttgcggtgaacagagattgtgccactgtgtactccagcctgggtgacaaagcaagaccttgtctctaaaaaaaaaaagaatttttcataggtgcttcatgtcacgtcacatcagaaggcacacactatctagatgtctcactgttaatgatgctaaaagactgatcagggtcaggtcacggctgcttgactcacgagaggtgttttgattttgctttttaagagcagcagcgtgtctatatgttgatgggagtaatctttgagagagggatacttatcaattaaacaaaggggtgaggttttctagaacaactttcttaagtaaacaataatgtgtaggatctagtggacaagtgttggttattgcaagtgttggacatagccagttcatctatagtaatgaggcatatggacataaatgcagataaagggggctctgttagggggtttgaggaagttctaatctggcagcttttgttttctccatgaacaagtagcaaattcatcacaggagagggagattgaaaggaggaagtcaagtagtgggcgagtgccagatgaatagactggacaagtagcatgtgatttctgaaaagcattaaggacctcctggcagttagggatcgcgaacttgaagtgaaatcagtaagcattgttgtacaattttctctagccatgctcagttgcatgtttgctggtgtggagcagaacagagggttggatttaaccaggattgagttttagccaatcatgtgtgatcaaagagggcaaaggactcattttaatgattttgaccatggaatttaagctgtgtaggaagggaagtaagaatatgaggaaagtgaggaacagtgacaggtggaaggattaaccacagaagcttgttggagttggggtactagttggaataggctgcatatagacaggagtggtaattggagatgggatgcctgaactcaagattatggaaggtattgttgggaaataacaagatcagagatacaactctgggagtgagtggccgtggtcacaatcactggggtagaggagatcaaaggactgtgaggccagaggactagaatatcctaaaagtggatattaatatcacaaggagttatgatagaaacagtgttggagctaaaatattcaggcaacgaagcacggtattttgggtgggggagaagatggctgcagccaggtaagtggggtcataggtagcgctgtctgcacagggtctctgtgaggatgacatgcattgatgcatgtgatgctcttcactttgagcctgacaaatagcatgtgttagaggttcagtctaacacttgctagaggcaacaagtgttagaggttcaccatctgagtctatgtggctccagtgagtagagcttaaaacactgggtttatagttattcattttttattttattttttagacagagtcttgctctgttgtccaggctggagtgcagtggtgcaatctcagctcacttcaacctccgcctcccggattcaagcgatcctcctgcctcagcctctcaagtagctgggattacaggcgcccgccaccacacccagctaatttttgtatttttaggaaagatgaggtttcaccgtgttggctaggctggtctcgaactcctaacctcaagtgatctgcccgccttggcctcccaaagtgctgggattacaggtgtgagccaccgtgcccagctgcaacactggatttatttttacagggaagttgattttcattaactttaatatatttctaagaggcagagctactcacacagttgtgtgtggtctggggcggtagtaaattccctgtcattcagtgtatccaacaggcaaaatgaacatttgcaatgatggtgccgtcaaggtgattctggcaactgaaggtgatgggtgggtaggtgggagggagtggctgtagcaattgaaggcagtgggcagtggggagggatggtgtcaggagctagcttcattcttgcattcagacatgactgaacatttcctagttgtggcccaggagctctcaatctggttgggacagatctgcaaacagataaatgtcacatagtttgatgaggggaagaataggcaccatggagttatgctgatcatctctgtgaggccaaggaagcttgagagtcaaggagcacttgagctggtgttggaagctgagtgggcatggccccatgggaacagcacaggaaaccacactttgctgaagaacttcttgtgcagagctgcaaaggcatgaaagagtcttcgacatttagagtgccattctacttaatctgggcaaattatttatcttccctgtctcagtttccctgtttgtaaaaatgggggtagtaatggtatccacagaggaagggatggtgactgttgtaatccctttgagtggattatctttttttttttttgagatggagtctcgctctgttgcccaggctgcagtgcagtggtgtgatctcggctcactgcaacctccacctcccgggttcaagtgattctcctacatcagcctcccgagtaactaagattacagacacacgtcaccacgccccgctagttttgtatttttagtagagacgggttttcaccatgttggtcaggctggtcacgggcttctgacttcaagtcatccacctgcctcagcctcccaaggtgctgggattacaggcatgagccacagtacctggccgagtggattattttacttgattctgtaaatcacactatgaggtaggacttgttattattactatttctattttatagataaagatgtcttaaatcttgggtcttaaggggttgagtaacttgctcaaagtcaggtagctggtgaaaggcagtttgggctcttgtcttgataaatctgattccaaagcttgtattgttcatccctaagctatagtcagtgcttggcacatagctagtgctaaataaatggtagctattattgccaggattgctaaagtttctcacccagagagttgagggttctgttatcacttctacagctggttgaagatcagtagtgctgctatctcatcagcagcagggactatttttggaaagccctcatcacctatgataaatctagatagttgcaccacttttgtttcaattggttgatttttgaaaatcaaaaatggagagtgatttttatcttcttagagggcaaggttttttgagcagatgcagttgatgtaagggaggaagagctgggattgatgtacttttctgttgtctgtgggctgtatcaaacaaaaagtttcatgttctggctgccagctggaggatggcagcaaaccagcattcacaggcaagaggtatcatccaaaagtctggtgactgcccacagtgttttctacagggggctaagaaagagcctcttccatgagtgatgccaggagtaagagctgtgaacccgtcacccatttattcattcaacaaatgcatactgagagcttattaagtgctagacattcatctagtgtctagagatactccctggaaataatagagaagaaggttgacaagattcctatttatgaagcttatatttttagtggaaggagacagactaatcaaatactaaatgaatgcctgcataattacaaacactcatgccacaagggaaattcatgctgtgaaaatgtcagagggataactatcagagaaattttctgactcttccaaggatgctgcccagaaaaccgtccttctttgagctgatgaggagagccccaaatgttttgacacagggcagagtggcacctctcactttttccctggtagtcatacctagggtttgcctgcctgccttcctcctggtcatgaagagctggggttctcccaacctgaattcctagccttcaacagaggattttctcttggttcatggggtgaagtcaagtatgtccatatggcttcctcttagttctgttaatgctagatctcctaggacaggccttgcagccaggttaatattgtgcaccaagttgatacacaaggttgaagtgtattttttagtattgcccccaagagttttgccttaattattcaagtaacataataaaaataataaaggaagttggctaggcgtgggggctcacgcctgtaatcctagcactttgggaggccgaagtgggtagatcacctgaggtcaggagttgaagaccagcctggccaacatggtgaaaccccatctctactaaaaacaagtattagctgggcgtggtggccggtgcctatattacccagctactggggaggctgaggcaggagaatctcatgaacctcgggggtggagcttgcagtgagccaagattgcaccacttctgcctgggccgacagagagagacaccatctcaaaaacaaagaataaaataataaaggaattcaaactgataagaattaatctttcatcagtttatccgtcaatggtattcaagtctcaaccatttacattttttctagacagttggatatacatatcttttaagtcaccatctgagtatacaggtaacattttctgttttgcttttttcattttaagattttaagtattttctcccctattactatataaattcatacacaattatataaattatttcaggtggctataccatgcttttcttatttccttattgctggatgcttagttgttaacagattttcaccttgataaataagctcgacattaaaaatttttatttttggcagtgttattaggaaagtttgtagtgcttaacatctacttcaaaaagttagaaagatctcaaattaacaacctaatattgcacccagaggaactagaaaaaaaatttaccccaaagctggcagaaaaagaaaaaaataactaaaatccagagcaaaactgaacaaaattgagactcaaaaatccatacaaagaatcaacagaaccaaaagttggttctttgaaaggataaacaagtttggtaaaccattagctagattaacaaagaagaaaagagagaagatacaaataatcacaaccagaaatgacaaatatgacattacaactaatcccacagaaatatgaaagatctttggagactattaatacctctgttcacacaaagtagaaaatctagaagaaatggacaaattcctggaaactcacaatctttcaagattgaatcaggaagaaattgaaacctgaacagaccaatatcaagttctgaaattgagtcagtaataaaaaacttaccaccaaaaaaagccctggaccagataaattcacagccaaattctatcagacatacaaaaaagagctggtaccagtcctactgaaattattccaaaaaagtgaggcagacagatccctctctaactcattctatgaagccagcattaccctgataccaaaacctggcaaagacacagtaaaaaaagaaaaccgcaggccaatatccctgatgaaaataaatgcaaaaatcctcaacaaaacactagcataccgaatccagcagcacatcaaaaattatttcactgtgatcaagtaggcttcattcctgggatggaaggttggttctacacagacacattaataaatgtgattcacctcataaacagaattaaaaacaaaagccatatgatcatctcaatagatgcagaaaaagattttgataaaatccaaaatcctttcatcaaaaaagccttcaagaaactaggcatcaaaggcacatacctcaaaataataagaatcatctataacaaatccacagccaatatcatactgaatgggtaaaaactggaagcattctccttgagaactgaaacaagacaaggatgcccactctcaccacttctattcaacatagtattggaagtgctgtccagagcaatcaaacaagaaaaagaaataaaaggcatccaaataggaaaagaagtcaaactgtctctctttgctgacaatatgattctatacctagaaaactataaagacactgccaaaaggcttctggaactaataaacaacttcagcaaagtttcaggatacaaaaccagtgtataaaaattcatggcatttccataaccagtaattttcaagctgagagtcaaatcaacaacacaatctcatttataatagtcgcaacaaaattttaaatacctaggaatacatctaatcaaataagtgaaatatctctccaaggagaactacaaaactttgctgaaagaagtcatggatgacacaaactaatggaaaaacatttcgtgttcatggattaaaagaatcaatatcattaaaacagccacactgcccaaagcaatctgtagattcaacactgttcctatcaaactaccaatgtcatttttcacagaactagaaaaaacctatcctaaaattcatgtgtaaccaaaaaagagtacaaataactaaagcaatcctaagcaaaaagaacaaactcagaggcattccagtacctgacttagaactgcactgtaaggctacagtaaccaaaacagcatggtactggtaccaaaacagacacatagactaatggagcagaatagtgaacccagaaataaagccacatacctataatcatctgatctttaacacagtcaacaaaaataagcaacgggggaaagaactccctattcaataaatgatgctggaataactggctagccatatgcagaagaatgaaactagatcccttccttataccatatacaaaaattaactcaagatcaattaaagatttaaatgtgagacctcaaactataagaatcctggaagaaaacctaggaaacaccattctggacatcaaccttgggaaaggatttatgacaaagtacttaaaagcaactgcaacagaaacaaaaattgacaagtgggatctaattaaactaaagagcttttgtgcagcaaaagaaactatcaacagaataaacagacaacctacagaatggaagaaaatatttgcaagctatgcatctgacaaagatctaatatccagaatctataagaaacttaaacaattgaacaagcaaaaaacaaataacaacattaaaatgtgagcaaaagatatgaacagacaattctcaaaagatgcatataagctgccaacaaacatgaaaaatgctcagtatcactaattattagagaaaagcaaacaaaagcacagtgagataccccctcacgtcagtcagaatggctattattaagtcaaaaaacaccagatgctagggaggctgcagggaaaagggaacacctacacactgttgttgagaatgttaattagttcagccaccatgaaaagcaatttggagatttctcagaaaacttgaaaacagaactactattcaactcagcaatcacattactgggtatatatccaaaaggaaataaatgtttctaccaaaaagagacatgcacttgtgtgtttattgcagcactattcacaatagcaaagaatggaatcagcctaggtgcccatcagtggtggactggataaagaaaatatggtacatatacactgtggaatagtacacagccatgaaaaagaacaaagccatgccctttgcagcaacatggatgcagctggaagccattatcctaagcaaattaataatgcaggaacagaaaaccaaatgccatatgttgtcacttataagtgggaactaaacaatgaatgctgatagacataaagatggcaataataaacactggggactacaagacggggaaggctggggaaagagctaaaaaatgaattattcagtacctgcatggcaggatcaatcataccccaagcctcagcattgtgcaatataccaggtaacaagcctgcatacataccccctgaatctaacatataaattaaaattattttttaaaaaaacccttttcttctttgtgtgcgtattgctttatagaactcatattctttatctcattaatcctctttcatttgtcatcagaactatgtaatgtagagaatcattttacatgtggggaaactggagtatgtaatcttttgaattatttatgaattatttatttattcactcttatttcctagaagtacagtagcctggtccatggtcagaagctcttaattctatggcctgaatacattctagaaaggttacattaatttatatgatcctttgaatatatatcgatttaattataatctgtccagcaatgagtattatcatgtagaaaactgcggacgaatgtaaattctataaactagtttctcagtattctagttgcccctcttgggtttctctcatgattaaccataactttatatgcttgttaattgtgctttttattttgtgattagtctgttcatgttgattacctctttattttgggagacttttattatattaaccctttttatattttgacttttcctttttattgtagttacagtatttttcattgtatagatgttgaaattttcttgcaactgaatgtattaaacttttcctttgctattttcctacatcgcatcaaaagaagaaagagctgacaggtatatatttatatttttagctgttttttgttggtttgtttagagacaggttcactctgtcacctaggctggagtgcagtggcgctcatagctcactgcagcctctaactcctgggctcaaatgatcctccctcctcaacctcctgagtaactgggactacaggcatgcacgcctggcttatttttagctttttaaaattacatttttatacttttgtacattttttcaaagtcaaagaataatggatgtacattttagaaattttggaatatatgtaaaattataaaagatgaaaacatctattattaccattctgggtgtacttttttctagtactttttcctagtactttttcacgtttttttaaatgtattttttttctgaatttggatagtgtttaccgttttataacgtattttttcagttacaattatactgattgaactttcacatattattaaatattctttgaaaataaataattttttgaaaatctgtatgaagtttatttcaggatggacctaattactccctgtttacctccaagccagcaattaaacaacctgttcttcccaggttggtccatggtggccgctttagctttctagcccattcttatctggtgtcaagtctatttctttttttttttttttttttttcttttgagacagagtctctctctgttgcccaggctggagtgcagtggcgtgatctcggctcactgcaacctccgcctcccgggttcaagcaattctcctgcctcagcctcccttgtagctgggactaccggtgtgcgccatcatgcctggctaattttttttttgtattttagtagagatggagtttcaccgtgttagccaagatggtcttgatctcctgtcctcatgatcctgatccgcctgcctcggcctcccaaagtgctgggattacaggtgtgagccaccacacccggctagtgtcaagtctatttctaggctatctgtgctgttcacagatccagagcattgcacctttaataggcttttctctctctctttttcctgagccctggaggcttcctggattgagacctagcctaggtctgcataagcacctttccatcttgttaatgtttaacactgcctctgctggaaaacagctctcacctcctctctttctgtctcttattttttgcctttgcagatgagttttgatcatcctgagaaaaatgggccttggcctgcagacccaataaaccttccctcccatggataatagtgctaattcctgaggacctgaagggcctgccgcccctgggggattagccagaagcaggtaaggaacacacagaggcatgggctagcaaaggggtacattcctgagtaaaagctggtgtggcagatgtcctggcagggaatctcaggatctcagtatctggctccagctttgctgttttctttttgtatgtattttttagtcctctttaactgctgattcaatgtgggtttcattggggggtgtagagaaatggcttgtccatttctattaactatataagatttaagttattctgtatttcagtcaaccattctgagtacctactacctgccacgaatgcaactggtactgagtatgtcatgacgggtgggtcgggacaggatttccttgctttgagcattgatttctgccggttcagtgttggccagttctttgaaggtgatgatgcaagtcgctgtgttcttcctctagaagcctcgtgatgattgtaaagattctctgatacaattgcatcagttcaataatctttcattgagtatccgctctggtccaggcactgtgctgggtactagggtttcagaaaggataccaggaggagttttccttgagcagcaaagtcaggcatgaaaagcaagcattacaaagcactggctggcagcaaaggggagcagggatagtgcggaaggggaggtggcctccactgaccttcagaagcagaaaggtgatgctgtcagagctggcaggcacatggacaaggagaaagagtgcagcagtgcagacacctggaggcttaacacagtctggtgtaattggaaaattcaaagcttagtgtgtttttccaaaacatttgtagagaaaagtttgctactcttttccctcggttgcgccatttagagaaagtttcttcagcctctgccttcttcagacaatttgagagatgagaaagggtcttgcagttataagtgcctgtgaccagaaactccagccacctggtggacttggagcctcaaccaagggtggtgtcaagggaccacatgagcccttatgtgagatttcagatgagtgccctgaggccatgacagagcacaggctgtgaaggctgaggctgtctgatggttgcaagactgtcgctagacccagctgtttggaggaactcttctttcctgggaaaccacaccttggagagtaggtactgggcagctgctgcctgagcctccactcctgtgacagtgaatcaggcccttcctgccatcttgtttcattcagacatgtgaaagtcaggttctaagtccactatttccaaatcactcatgcaactttgaaaattatttgtatttccaaacctcactatactcagctataaatggagctcataaaatctgctgtgcttatctcacgggagtataataggtctgtaaaaccttaccaatacggaaagtacctgagtgttaccactcagtgcacagcagggatggcaggtgcagcactgatggtgaaggtggcttgtctgcgactgtctgacagacgaagttgcctctctagtgaccttgagtccgacttgatcacactgacttctcactgtcccttatcacagatgcatgtccttgggtggaaagatgatgaacttttagagtcagacagacctgggctggaattctggttctagaactgacttgctgttgacattggagaaaccctataaccttgctaagtctcagttttttccatttcctaaaataggattgtcaatatctctatcatagtgttgtagtaaaggttcaatgagatattgcaaggaaagtgactaccacgtagtaggccctccttaaatgctactttccttcttttctctagttcttcttcagttgtcatatggtcatgtgattacctgtgttgggtgtctgcggaaattgaattccttagtttctggtaatacaacaagcttccacccttcacttcatgatcttctatctgaattcttcttccactgtgtacatttaatcatttccacaacttcagcagcccaagataggagcccatcgttcccagagtcactggttcctgaggtctgggatggtggaagcactgctttggttggtactgccaatggattccaggaatgagctggatgtcagttcatggagaattcccagggaagagcctggagctcagggctgctgagtcatggctgtggcttcacactgctgtcttcactacccgtatcacctccacatggcccccaggctgagctgctgctctcctgtctctgttcagaataccttctgtgcctttttgcttatctagttcaaatccaatgaataccatgctcttgttttgccctcccaacactctgcaaatcacatagggcagagataattattctgaaaaactcaggggcagaaatattaagtgacctgcccaaggtcaccaagaatggggataagaacccaggttttgtgaacacccagtccagtactcctactaccttttcctgatatccttaggagcgggatccatgggaagggacctcagacccctagtgggttagcaaaaccccggaggtgattgctttgatttattattgtaaataaacccagtgattggggaaagaatgtaatgttttccaaaagatacagacattatttgagttcaaagtgcttccagtttccattcagttacacaataaattctgagaaaacaaagtaggtgtttactcagaaataaagagactattcagtctctatttgctcagtgaaatctattttccagagcttcttgcagttctgtgcatgttgtactggaaaggacatgggttatggaatcaaatccacttcgatttgaacctcagtgcaaccatttcctcagctctgtgagcttgggcacttcccttgacttcttagagcctcaggttgctaatccataaaatggagattataacacctttgaagtgaaccctgtacaggttaggagatgcccttcgtattagactatgctatgcgtggtgcccccagagttgtgtctcatggtggccctggttatggtgaagttaagtgaaataacatctagcgtgcttaatgaatttttgtttccatttccttagttggctacatgtctgctatcttacccagaattcctagcctctatcatgaggtgagtcagcttcctgtctcagcagtgctcttcttgcagggcactgcacaaaactgtggtggagataaccctcgatcttctcatgcaggagtccagcatcgcagcccttagagagatacatcagaaatctatggcatcatctataacgagaagtctttttctggccattttgaaggggtgttgggccacttactattttaggaagtttaggtctggtgatgtaaaacagtcagcctgcttttttttattctatttttttttcaagcatgcatggcttcatttaacaaatgttacaaggccctaggaactgagtgatttgcaagatgtggtttctgacttcaagaaactcagagtgcagtcagagaggtagaccaaggcaaccagaaactaatattcagcatagaaaaagtaatgatgggaggacatataaagtgttcatggctcaagaggaagaagggagtggaagagtggaagaggaagagggactgctgtccacgttcaaagcccaaattgagtctgacttttgtcgagaattgcttaacaggctgcagaggtggccaggaggtagaccagggctggaattcaagtcacctcatttcaaatctattgctcagtccatcgctccgcctcatgccacattgggtttttctttacatcatttgtttttccttgtctcactttttttaggcttgttttcctgctcagaacaaagtgacttccctgaacacatcttcattatgattcacaccaacctgaagaaaaagttcagctgctgcgtcctggtctttcttctgtttgcagtcatctgtgtgtggaaggaaaagaagaaagggagttactatgattcctttaaattgcaaaccaaggaattccaggtgttaaagagtctggggaaattggccatggggtctgattcccagtctgtatcctcaagcagcacccaggacccccacaggggccgccagaccctcggcagtctcagaggcctagccaaggccaaaccagaggcctccttccaggtgtggaacaaggacagctcttccaaaaaccttatccctaggctgcaaaagatctggaagaattacctaagcatgaacaagtacaaagtgtcctacaaggggccaggaccaggcatcaagttcagtgcagaggccctgcgctgccacctccgggaccatgtgaatgtatccatggtagaggtcacagattttcccttcaatacctctgaatgggagggttatctgcccaaggagagcattaggaccaaggctgggccttggggcaggtgtgctgttgtgtcgtcagcgggatctctgaagtcctcccaactaggcagagaaatcggtatgttctggggttgttctgtgaatggcagtgcttattgggactggctgggcatattgatggtatgggagacaagtggcccaagtgtggctcagcggaccagtggagtgggcccagggcagtgtttttttcagagtcacaagtgacacagagggagttgaacagatggcgctctaggcccccgcatcttttatcaattagaagagcttcattattgtttcctaatatttttagttgatatataataattagatatatttatggggatattttgatacgtgtattcaatgtgtaatgatccaatcagggtaattagaatatctatcaccttgaacatttattgtttctttgtgttgggaacagaatagttttattttcatctgttttaaatattggaattgtgtagaagatttcatttgaaaaagagagttccgctgctaccaataatcaaaagcctacaattgacctttgaaaagacttgaagcatagatctgcacatcatttccaggttctgaaattctgttgtttttcctgattagtggaggactctattggcctcaacaacctgggtaattttcagcttttctctttgaaaagatttaattgggtcagtaattcttaactgggggctatggaccaacttcagagggtcatgaatccctgcaattgcgtgcaaaactgtctgtggattaggtgtgtagaatgtatgtgtatgcgtataagtgtgtccgtgcatttttccaggaagggagtttgtagactgcagtttattctctaagggatctgtgacccaaaaaagtttcagagtcactggtcacaacatattaatttgcttttcttgaaaccctttgtagtgaatcaagatagaaagtctgtctatatttgtaaacctgtgtaacagagagccttatttctcttatgctgaatgtgttttccattatttgaaatgaatcagctaaagaaagcaaagcacaggaagctttgctcctctgtcagcctggaggtactggagcaggtgaggtcatacgtctccttttttatttccttcatttgactgccaggaaaaatggtctgaaacccagcacaggctctcaaagaaaagtaggcccaaactggattctctagagcagaaagaaatggtgagatcacagtttctacctccccaaataggcagctgccccgctggccggccccacctcaacttctgcttttgtatttttggtttttcttggactttgttttcaagaaactaaatgtgattggtttttgttcatccataatggagctaagtttctttcttctccatttttgctgcttatgtagcaaatgtttgggatatcctaggtattagctgatccttcttcttcatgtcaagttaatattgcgtgcctggctgaaattgtactgaagtttgagacagggcctgatagctctgttaattagaactacagctttaattttatgcactccttaaagatttggggtgatttaagtaaacattaatacaaataatatttttctatagattgcagtttcaacttcaaaataaggatttccacagaaggactttgatcctgagatgtaatcaaaattgcatgttagacttcgaatgttctgctgttatggggtatatatcctcttggcattttgtctaacaaatattttaagacattcatatattcttttatttattcatggattcatcaacaatacaaaggggaaagggaagggaaaggccctttgttgaagcccgagttgcaggcagcgtgccaggcccatacacttcctcctgcatctggaatttgttgagtctcttcccaactactggatggatcagattatttcaaatggttttcttttacaaataacattgctgacaaggtttttgtgcagataacttaggtaaccactattgacattcaacagggaaatatcctcagaagtgaggctagaagacacgagtaagagacattttatgacttttttttttttgtccatagcaagattttctatcagagagagtgtaataacatactctgcctccagcagtctcacaaaccagccaatggtgggctcagtcattttcaattatttttgatagtttactcatacatgttaagtatcctagatttgctggaattttcatgtcaaacagtagcataattttaaaacactatcatcaatacaagtgatgcttattatgcatctgctgagttcctaacatgccttgctcttttcatcctcccagaagtcctgtgaggttgataagattattggtctcattttgctggagagctaaatgcggaggctcaagtggtcacacaactggctaatagcagactgaggtttgaaagcagagtgcttgcttcaaagaccccactcttggcacctctgctgttgtgcctcataataattgtagcttcataataaaattcggtgtgattattcttttattatgttaaaaattttcttctattcttgtctattagctgtcctagagagaaagagaagggtattctgagttaaggcaaaggcaagaagcaaaggctgcacggggaaaagtgtgtttgggcatcacaaataatcctgtttggacggcatgtgggtccttgtgggtgaagatgggtgaggaacgaggccagaaaggtagctaggcattagctcttagagaacgttgatagtcacaataaggactttaggtttcattctttaagccatggagagccctaggaggtttttgaacaagggagacttctcacttctctatgagtccctgttttgtactctataatgtctccattattagggactattgccacaaccaggtcagaagtgccaggcctgcccaggctgtggtagcagtgatgaagagaaaggaccttacctgagagggctcatgaagtaagaggcagaacttactatctagctggaaatgatcttgagtgagaggcaggagccaggatgtctagcctgggagcaggctgtatcttaccaaggggagcatgcttccagaggaacgcagattccactttggatgttctgagactgaagtgtgtgtggatttccctgggtagatatctatgctgttgagtacttaattctagagaaggatcagatatcgagatagatttacaagtcatttgtatcaaggtgagataatggttataatccagggaagaagaccaattagaaaatctagaaaaagatttacatttaaaggacaaagaaaagaacagggaaaagtcagaagggtcagagaccggctagaggagaactaggtgtgcaccatacaatggaaggcaaagggggatggagtttgagggatgttggctgttggtatcaaagtctgcagaggtgggacatattcttgggcagaataaggactgagaagacacctgtgaactgagtagcttggagaacatgatcagttatatcaggggtcagcaagcttttcttaaaaggccggatagtaaatagttttggctttgagggccatgatgtctgtcacaactactcaactctgctgttgtactgcagaagtaacaatagatagtagtaaatgaacaggcctggctatgttccaacaaaactttatttacaaaatgagggatgcaccagatttgtccttcaagtcatagtgttttgttttgtttttgacggagtcttgctctgttgcccaggctggagtgcagtggcatgatctcggctcactgcaagctccgcctcccaggttcatgccattctcctgcctcagcctcccgagtagctgggactacaggtgcctgccaccacgcctggctaattttttgtatttttagtagagacagggtttcaccgtgttagccaggatggtctcgatctcctgatctcatgatccgcccacctcggcctcccaaagtgctgggattacaggtgtgagccaccgcgcccggccaagtcatagttttttttttttttaactctgatctatagtatgtctgttttcttcaaccggactcagaatgtaattttccataaatggttgtaggatgtattaggctaacttgaaaatataaaagcgtttggtgataaattgtgataaaatttctttcataataatttctagctatttagagttaactacacctagaggcagtggattttgatgtatttatgaatttactaacttgagctgattctgttgaattttctaagcgtgtgattgtataatctgaatacagtgatgcatttattttttcttctcctaatttgcctctttttctgagctctaattctaagttacagagaggtggtagtttcttttttctgcagcctttccccctcgctaggcttgtttgctgggatctcagtagttgtggatttctcttggtgatttcttagaggcctatttgagtttgaaagttcaactttcaattagcagggaggtttgacaaacaggatttttttctctttaagtacccaagtcagtttaaagttttctttttaaaaatttgatatataataattgtacatatttatggggtacatgtgatattttggtacatgcatacaatgcgcaatgatcagattgggtaattagaatatccatctcctcaaaaaagttttctcctttgattggcttttttcttttcctttcttttttttttttttgagacagagtcttgctctgttgcccaggctggagtgcagtggcgtgatcttggctcactgcaagctccacctcctgggttcacaccattctcctacctcagcctcccgagtagctgggattacaggcgcctgccaccatactcggctaatttttttgtatttttagtagagacgaggtttcactgtgttagccaggatggtctcgatctcctgacctcgtgatctgcccaccttggcctcccaaagtgctgggattacaggtgtgagccaccgtgcccagcctgattggcttttttcttagaatcacgtccaaacttcatacctgggcccccatgtccgtgtatgatctggttcctgccaacctctgtaactgtatctttgatttttcttcccctcactccttgtctacagtcaagtccctgccctcattgtggtcctgacacttgctgcatcctctgactggtggacttctctgaacccttcccaaggctggccatcctttgggtctcagctccaaggcattccctgaatcatcactctatgaaggaaattccctcagtgtctctggcacacagctcagcttgttagtgtcacagtgtttgtcacaatccgaaattatcttatatgtaggttgttgtccgtctttactgtctatgtccgtgcagtagaatgtaatatctctgagggcatggaccttgtctttgttgctcacaggcgtcgtctcccgtgtctaaaactgtgcctggcatagagtaggtgctcaatcagtatttgttgactgaacaaaacaattctcctttcttatggtcaacatcaagcatctgttctaacctaagccttctgtgctggatgttctccagtggcacctccaaatcccactctcacccttttccatctggctctgtccctgagaaattgaattttttttttttttttttttttttttttgagaatgagtcttgttctgttgcccaggctggagtgcagtggcacaatctcggctcacgctaacccccgcctcctgggttcaagcgattctcctgcctcagcctccagagtagctaggattacaggtgcgtgccaccacgcccagctaatttttgtatatttagtagagatggggtttcaccatgttggtcaggctgatgtcgaactcctgacttcaggtgatccacccgcctcggcctcccaaagtactgggattacaggcgtgagctactgcgcccagctgagaaattaaaattttgaactgcgttaattggcatttctcactctctggattttctctgggactggccaggagaagcagtggcattaaagctgagaagaagactaaggtcagggcacctattccgccatgtttcgccttgcagagtaaactcaagctgtatctttctcttgactgaaggtctcagatcctgccaggaggccgtcccagtcttggtcctgctctgtcccttttcccttcagttctatgagatccaagggaaggggcagaaccaggttgggatattgactccctcaggctccttcttgcccggaggttggcaatagctgtgttcctctcctaaaggcaacagctcccgacaggtgtccctcctcagctcagggtctccgctcatcaggccacagtagacctggggtggtaatgacaccctgcagtcatcaaccctggggctttagcctattccgtgttgatttctttaaactctaccccaacttggtaagtagtccttttatgaatctctcaattactccattggagcttctcatctcttttctactgggattctcaccaataatttattcatctgtgaaatggaaaagttgactaactgaagtttctgatggatctgtgtttctcatgcaattactactaatccctttcgaaccagtgactgattctgacaaaatgtgttgtaattctgagttgtgtaaagatatacctcctgccctatgtgcacttcagtgtacctgccctgtaagatgataacagtttggactgtgcccttctcagataattttcaaaccattttgatgaaattttgccctaggattgaggatagggttgtgttgttttcatgaatgatgtttctgtgttcctgaggtttagtacatacattggaactgaaataaagagagaggctttcatccttaattctgtggatatcctctttctaaatcatcttgtgttcagtcaaatgccctcacttccccaaatcctgtgtggataaagaatgatccaaaacaaacctgaataggacaatagaggattcagctgacccccagatcccgtgtagatttcagtggtgagccccaaacttgcttgaccgagtaagattgaaagaagttctcataggatcacaggatttggatggctccttaaagtcttcagttccctccttcatcagataggtcaacgtggggtagagaaacttttccaagtcttccaaacactgcttaaacagttgcaaagacaaggagctagcccaggaagcttttaggtttttcaagatggcctgtttgattttgactggatttagtacattgtttctgacaatggcttacaaagaaagagagagagagagagagagagagagggagggagggaaggaaggagggagggaaggaaggaaggaaaagaaggaaggaaggaaggaaaagagagagaggaaggaagttagtttagctctctgacctcctcttccatttctgccacaccagttctgtgactcttccctgggcctcaggttcctaaatggaacgcctgggggttgtcttggatgccatagttaaatcctgtccatttgctgagcactgcatgcttttcaaagtgcaatggggtcctttgcacttgtgggatacactgaacatatggtagtgttttcatttttctgacagagatagaaatataatctactggtgataccaagagaatatctggtttgctgctttgataactggagtagctactccactgtaagtagcacactggctttgttcacttttctgtgtgcccaggcacaagcgaatgtctttgaatgggtttcaggaatgccacagtatggcccccttcagcccttacagtggctggcagacaggtggtcatctctgcctaggagctttacctgagcaccacacaaatactgccatttcgccctgtggatcatgatggggtaaagatggggaagcattattcccttgccccctcccccgcctctcgtctttctctttttctgcatattgccagtgctcatcacctcttttctgtttctttgtggtttatagatgatcatgacgcagtcctgaggtttaatggggcacccacagccaacttccaacaagatgtgggcacaaaaactaccattcgcctgatgaactctcaggtaaaatttcttctgtgcagctatggagtaagagaaggaccacagtgtgggctctaatgtggaatgtatctactgggagcatatctaggctgccaattaagtctcttgatcttcctgagttcctgattcctcactggagaagaagacaatgattccatgacccaacctgatgatgtgtttatttaaagaaaaaccctttagtattagtgtctgctaatggaggtgtctggtacccaggaaagtagagttgagctgtccttgctgctgcaaggtcatacctggaggtttacatgagggacagcagagcgcagaacatccaggggagagtggggagtgttgtgaaaagtgaatgaaacaatacacaggagagcactttatgaaccgtaaaatgctatacaactactataagacagtgtcaccatgtaattatgtgtaatatggcactagaattcatgtactatttcataaattcccctggataattaggttcccggagtattttcaggtagcacatgccgatttctcaatactaagggagacttgagaaatattcttgccacagggttctgttagtatattttattagtgggaaaaactgtattacacatatatatgaaaatatcaaaaattgcacaatagggctgcaacctgcccatctcacaaccaccaacatttgcctttttctgaataaacatatgtgctctgggggtttttatgtcagtatttagtctgcatacttccctaggagtcctgggcatggggtggatcctggaacagatcagaaatgccttttcagcagtgtctgtggaatgtgtgtttctttccttctctactagggctccacttccctatatctgtctcttcacttccttactttcaggaactcaccagctaggcagaagctgcttcctgcatagcccactttctatttgaagcccacaaccttaagaaacttttttttaaaattatactttaagttctagggtacatgtgcacaatgtgcagatttgttacatagatatacatgtgccatgttggtttgctgcacccatcaactcgtcatttacattaggtatttctcctaatgctatccctccccttgcccccaaccccacaacaggccccagggtgtgatgttccctgccctgtatccaagtgttctcattgttcaactcccacctgtgagtgagaacatgcggtgtttggttttctgtccttgtgatagtttgctcagcatgatggtttccagcttcatccatgtccccacaaaggacatgaactcatccttttttatggctgcatagtattccatggtgtatacatgccacattttcttaatccagtctatcattgatggacctttgggttggttccaagtctttgctattgtgaatactgccacaataagcatacgtgtgcatgtgtctttatagcagcatgatttataatcctttgggtatatacccagtaatgggatggctgagtcaaatggtatttctagttctagatccttgaggaattgccatactgtcttccacaatggttgaactagtttacactcccacccacagtgtaaaagcattcctgtttctccacatcctctccagcatctgttgtttcctgactttttaatgatcgccattctaactggtgtgagatggtatctcattatggttttgatttgcatttctctgatgaccagtgatgatgagcattttttcatgtgcctgttggctgcataaatgtcttcttttgagaagtgtttgtttatatcttttgcccactttttgatggggttgtttgtttttttcttgtaaatttgtttacattctttgtggattctggatattagccctttgtcagatggataggttacaaaaattttctcccattctttaggttggctgttcactctgatggtcgtttcttttgctgtgcagaagctctttagtttaattagatcccatttgtctattttggcttttgttgccattgcttttggtgttttagtcatgaagtccttgcccatgcctatgtcctgaatggtattgtttaggttttcttccagggtttttatggttttaggtctaacatttaagtctttaatccaccttgaattaatttttgtgtaaggtgtaaggaagggatccagtttcagctttctacatatggctagccagttttcccagcaccatttattaaatagggaatcctttccccatttcttgtttttgtcaggtttgtcaaagatcagatggttgtagatgtgtggtattatttctgaggcctctgttctgttctattcgtctatatatctgttttggtaccagtaccatgctgtttcggttactgtagccttatagtatagtttgaagtcaagtagcatgatgcctccagctttgttcttttggattaggattgtcttggcaatgcaggctcttttttggttgcatatgaactttaaagtagttttttccaattctgtgaagaatgtcattggtagcttgatggggatggcattgaatctataaattaccttgggcagtatggccctttccacagtattgattcttcctaaccatgagcatggaatgttcttccatttgtttgtgtcctcttttattttgttgagcagtggtttgtagttcttgttgaagaggaccttcacatcccttgtaagttggatgcctaggtattttattctctttgtagcaattgtgaatgagagttcactcatgatttggctctctgtttgtctgttattggtgtataggaatgcttgtgatgtttgcacattgattttgtatcctgagactttgctgaagttgcttatcagcttgaggagattttgagctgagatgatgggtttttctaaatatacaatcatgtcatctgcaaacagggacagttcgacttcctcttttcctaattgaataccctttatttctttctcttgcctgattgccctggccagaacttccaacactatgttgaataggagtggtaagagagggcatccctgtcttgtgctagttttcaaagggaatgcttcagtttttgcccattcagtatgatattggctgtgggtttgtcataaatagcttttattattttgagatacattccatcaatacctagttcattgagagtttttagcatgaagggctgttgtattttgttgaaggtcttttctgcatctattgagataatcatgtggtttttgtcattgttctgtttatgtgatggattatgtttactgatttgcatatgttgaaccagccttgcattccagggatgaagctgacttaatcgtggtggataagctttttgatgcactgctggatttggtttgccagtattttattgaggatttttgcatcgatgttcatcagggatattggcctaaaattctctttttttgttttgtctctgctagactttggtatcaggatgatacttgcctcataaaatgaattagggaggattccctctttttgtattgattggaatagtttcagaaggattgatacaaagaggtttgtacctctgctagaatttggctgtgaatccgtctggtcctggactttttttggttggttaggctattagttattgcctcaatttcagagcctgttattggtctattcagagattcaacttcttcctggtttagtcttgggagggtgtatgtgtccaggaatttatccatttcttctagattttctagtttatttgcatagaggtgtttatagtattctctgatggtagtttgtatttctgtgggatcagtggtgatatcccaatttatcgttttttattgcgtctatttgattcttctctcttttcttctttattagtcttgctagcggtttatcaattttgttgatcttttcaaaaaaaaaaaaacagctcctggattcattgatttttttgaagagttttttgtgtctctatctccttcagttctgctctgatcttagttatttcttgccttctgctagcttttgaatttgtttactcttgcttctctagttcttttaattgtgatgttagggtgttgattttagatcttttctgctttctcttgtgggcatttagtgctataaatttccctctacacatggctttaaatgtgtcccagacattctggtatgttgtgtctttgttctcattggtttcaaagaacatctttatttctgccttcatttcgttatgtccccagtagtcattcaggagcaggttgttcagtttccatgtagttgtgcagttttgagtgagtttcttaatcccgagttctaatttgattgcgctgtggtctgagagacagtttgttatgatttctcttcttttatgtttgctgaggagtgctttacttccaactatgtggtcagttttacaataagtgcgatgtggtgctgagacaaatgtatattctgttgatttggggtggagagttctgtagatgtctattaggtctgcttggtgcagagctgagttcaagtcctggatatccttgttaagtttctgtctcgttgatccgtctaatattgacagtggggtgttgaagtctcctattattattgtgtgggagtctaagtctctttgtaggtctctgaggacttgctttatgaatctggatgctcctgtattgggtgcatatttatttaggatagttagctcttcttgttcaatcgatccctttaccattatgtaatggccttctttatctcttttgatctttgttggtttaaagtctgttttatcagagactaggattgcaacccctgcttttttttgctttccatttgcttggtagatcttcctccatccctttattttgagcctatgtgtgtctctgcatgtgagatgggtctcctgaatacagcacactgatgggtcttgactctatccaatttgccagcctgtatctttcaactggggcatttagcccatttacatttaaggttaatattatgtgtgcatttgatcctgtcattatgatgttagctggttattttgcccattagctgatgtagtttattcctagcattgatggtttttacaatgtagcatgtttttgcagtggctggtaccagttattcctttccatgtttagtgcttccttcaggagctcttgtaaggcaggcctggtggtgacaaaatctctcagcatttgcttgtctgtaaaggattttatttctccttcacatatgaaggttagtttggctggacatgaaattctgggttgaaaattcttttctttaagaaagttgaatcttggcccctactctcttctggcttgtagagtttctgctgagagatctgctgttagtctgatgggcttccctttgtgggtaacctgatgtttctctctggctgcccttaatattttttccttcatttcaaccttggtgaatctgacaattatgtgtcttggggttgctcttctcgaggagtatctttgtggtgttctctgtatttcctgaatttgaatgttggcctgccttactaggttggggaagttctcctgggtaatatcctgaagagtgttttccaacttggatccattttccctgtcactttcaggtacaccagtgaaacgtagatttggtcttttcacatagtcccatatttcttggaggctttgtttgtttctttttactcttttttctctaaacttctctttttgttttatttcattgatttgatcttcaatcactgataccctttcttccacttgatcgcattggctattgaagcttgtgcatgcatctcgtagttcttaagccatggttttcagctccatcaggtcatttaaggtcttctctatactgtttattctagttagccattcatctaatcttttttcaaggtatttagcttccttgccatgggtttgaacatcctcctttagcttggagaagtttgttattactgaccttctgaagcctacttctgtcagctcgtgaaagtcattctccgtccagctttgttctgttgctggcgaggagctgcgatcctttggaggcaaagaggcactctggtttttagaattttcagcttttctgctctggtttctccccatctttgtagttttatctacctttggtttttgatgatggttttggtgtggatgtcctttctggtgatgttgatgctattcctttctgtttgttagttttccttctaacagtcaggtccctcagctgcaggtctgttggagtttgctggaggtccactccagaccctgtttgcctgggtatcaccagcagaggctgcagaacagcaaatattgctgcctcattcttcctctggaagctttgtcccagtggggcaactgcctgtatgaggtgtcagtcggcccctactgggaggtgcctcccagttaggctacacggggctcagggacccacttgaagaggcaatctgtccgttctccgagttcaaacaccgtgctgggagaaccactgctctcttcagagctgtcagacagggacgtttaagtctgcagaagtttctgctgccttttattcagctatgccctgcccccagaggtggagtctacagaggcagcaggcctggctgacctgcagtgggctccacctacttcgagcttccagggctgctttgtttacctactcaagcctcagcaatggcagacgcccctcccccgccaggctgctgtcttgcaggtcgatctcagactgctgcactagcagtgagcaaggctccgtggtcctgggacccgctgagccaggcacaggatataatctcctggtgtgccattttttaagacagttggaaaagcgcagtgtttgggcgggagtgtcccattttttcaggtaccgtctgtcacgacttcccttggctaggaaagggaagtcccctgaccccttgcgcttcctgggtgaggtgatgccccaccctgctttggctcgtcctccatgggttgcacccactgtccaaccagtcccaatgatatgaaccaggtacgtcagttggaaaagcagaaatcacccgtcttgtttgtcgatcgcgctgggagctgcagaccagagctgttcctatttgaccatcataagaatatttttataacgggatagaaattgaggaacttaacttatttgtaagtggtcaccatcttgtttttttgttcttcctctaataccttttaatttttttttaagaaaatcactttctatcaccgtcacatcttctagtcacctctaggtgcttccaatgcctgtttgttgttcaaatttatattttggcttttggtattacttttattattattattattattattatttgagatggagtttcgctctgtcacccaggctggagtgcagtggtgtgatcttggcttactgcaacctccttttcctgggttcaagcgatcctcttgcctcagcctcctgagtagctgggattacaggcatgcaccaccatacccagctaatttttgtatctttagtagagatggggtttcaccatgttggcccaactggtcttgaactcctgacctcaagtaaccacccaccttggcctcctgaagtgttagtattacaggcgtgagccatcgtgcctggcctacttttattgttactagaagagataggattgaaaggaatggactggctagcaagaagctctctggggcaaatgacagttgagctagactttgaaagatgggcaggacttggggaaatagcaatagccgggcactccagaaagtggaattggcaagacagaggagaacaggaaatgagggaggcgttacaccactccaagagtagtgtaatgatcactcccctattagtgatcaggctggagtgcagtggcgtgatcataggaaatgagggagacattcagatacccctggctaagttggaggtggaggtgtagaagaattggctggccttgccccgtagagagagatgaggctggaccttcatggctgcttgtgctctggcaagtgtggaaattcagacagagggttaggaccagctttgtccctttcccttctcatgcctagtcaggaaccctggagctggagagcactttagggagcactaaaacctcatctccacttctatataagatgctacctaaatatccaggagagatgttcatttactcttaattaattcattcattcaacaaatgtattcagtattgagtagactgtggcagtcagtacataaactctatagttagcctgcttggggttgaaatccagctctgtctcttactagctgaaggatcatcaagttacttctctctaaaaaagggagaataattcccttacagggttgttgtgaggtgtaaataagaaaaatctgtgcaaagcacttagaacaatacctggcacatgtatcaataaacgttaactgcacttactattgatatttgcagacattggtaggggagggtacaattgtgagcaaaacaggctcagcctctgttcttatgatgcaatcaaatagttttacaaataaataaatttgcaaaaaagaactagagaagagagtggtcaaggtactaggagagccctgaaaggggagatttgagctattcaaggaggtcagaatccctaagtaggtggtacttggctgtgtagaaggaatgtgtggatgttgaaaagggtgggataagagcttttcaggaagaggcaacagcatgggtacagttttgtgtggaaggaaatgggggactggaaggactcaggaagaggtgagtatatgtgggactatgtggtgagagacaaggctgaaagcaagaaggagtcaagccatggtgctgcaccgaggcatcttcttttttcagtgggggtaggggggttggcctgtcacccgggctggagtgcagtggcgcgatctcagctcactgcaaacaccacctcctgggttcaagcgattcccctgcctcagcctcccgagtagctgggattacaggcgcccacaaccatgcccgactaatttttgtatttttagcagagacgaggtttcactgtgttggccaggttagtctcaaactcctgacctcaggtgatccacctgcctcagcctcccaaagtgctgggattacaggcgtgagccacctcacccagcagggtgagacatcttctttatggcatgatcagatttgcattttgtaaccatcactggctttcatctgagcagaggggctgcagtagatgaagacacatagttaggaaggtcttacaagtagtctgggttagatacgctgatagcttgcacaagagtaggggtgaaggtgaatgtgagaaaagaatgtatttaagggctgcttgcgatttgcagtcaacaggttttaatgtcgcattagatgtgagaagtaaagggagaggggccaaaggtgcagctcagtttctttcttgtgtaacttggcagctagaagttgaaattagaagtcagccccttatccatggtttcactctctgcagtttcatttatttgtggtcagctgcaggctggaaatactaaatgaaaaattccagaaataagcaattcagaagttttaaatgacacgttgttctgagtagtgggatgaaatcttacacatcttactttgtcccttcctcatcacaggaagaaggatgggtacagtacaataaaatattgaataaataagcaaattcaataaagtagcaggatccgaagtcaacacccaaaaaatattcattttttctattatgtgcaataacaatgaatgatctagaaaggaaatttaaaaaacaattccatttacaatagaatagcataaaaaagcataaaatacttaggaatgaatttaaccaaggagttgaaagacttatacaatgaaaactacaaaatagttctgaaagaaattaaaggagacacaaaaacctggaagacatcccatgttcacagattgaaaaaagtattgttaagatgtcaataataccgaatatgatatgcagatttaatgcaatcgttgtgaaaatccaaaagatatttctttttttgcagaaatagaaaaagctatcctaaaatttatatgaaacctcaagggaccccgattaaccaaacaatcctgaaaaataagaataaagctggagttctctcacttcttgatttcaaaaaatacatatgttacaataatcgagagagtgaggtacaaagacaaacatataaaccattggaatagaataaaagtccagaaataaagtcttgtatatatgtgtaaatgatttttgatgagtgtgtcaggatcgttcaatgaggaaaagacagtctttttaagaaatgatactgggaaaactggctatccacatgcaaaagaataaagttggacccttacctaacaccaaaaataaaaattaactcaaaatggatctatgacctaaatgtagaccaaaaactataaaactcttagaagacaacatagggcaaaaactttatgacatcagatttggcaatgatttcgtcattattacaccaaaggcatacatacgtaacaaaggaaaaaatatacaagttggactttatgaaaattaaaaataattgtatatcaaaagatactctcaacagagtaaaaagacaccacacataataggagaaaatatttgcaagtcatctatctgataagggattaatgtacagaatatatagaacactcttcaaacaacaataaaaaaaatcaaattacccaatttaaaaataggcaaaggacttgaatggacgtttctccaagatatacaaatggttagtaagcacatgaaaagagactcaactcttttttgctagggaaatgcaacccaagaatacaacacagcaccacctcacccccattagggtggcttctatgatcagaaatcggaatccgtgggcactgttgatgggaatggaaaatggtcagccactgtggaaaacagtacggcagtgcctcaaaaacttaaaaatggaattaccgtgtaatctaataatcttatttattggcgtatatgtacagaaattgaaagaagggtcttgaagagatattcatacccccatattcagactactcttattcacaatagctggactgcagaaggaacccaagtgtctgttgatgttgaatggatacacaaaagctggtttatacatacaataaaatattattctaaaaaaggaagaaaataccgagattggctacaacatggatgaaccctgaagacattatgccaagtgaaataagccagtcacacacacacacacacacacacacacacacaaaatactatatgaatgtggttgccagggaatgtgaggtgggagggggaatggggagttactgtttaatgagtatagagtttcaattttgcaagactgaaaaagttttggagatggtttgtggtgatagttgcacaacaatacaaatgtacttaatatcactgaactgtacacttaaaaatggttaagatagtcaatgttatgttatatgtattttaatacaatttttaaattggaaaaaatgtcagtaggggagacagtcacagaagtacaaacactgtatgattccactttatatggaacacctggagtagaaacaaagtagaatgatgtttgccaagggctaggaggagaaaggaatgtggaattgttgtttaatgaatactgtgattcattttgggaagctgaaaaagttctggagatggtggtgatagttacacaacaataggaatgtactaagctgaatacttaaagttgctaaaatggtcaattttatgttatgtatattttaaaagctttcttttaaatcaacagggagaaaccagttgatagagggagaaagtgaatatactaaaaagaggagaaaatgattagttacccacaacatgatggtggtggagccaaagcgtagtggaggatgaaccccagcaggcgggagtcagagggaagaaggtgcgagtggtgtagctggaggcagtcagtattagaaggatgagagggcttctattttctctgcaaagtggcatgcaaggccaagtcagaaggaggctgagggggaaagaggttttagtagagaaggtttgaacaaagagatttataattgtcattgaggtgagtgggaccgtcagtaaacctgatgaatggagtaggatttccaggccatgctgggctactttgaggttgaagagaatgaatttagagagaaaccaatctctgtttgatacatggatggtaggatctggaggtgagcaggcagcagcaaagaggagaggggagaggggaggagccctccctgagcactctcttggactgcggaggctacctactctctgagcacttcttcgtgatgattcagtcttcctcactgtgaagaacgaaaccccagtcctgcaaagatttgaaactgtatttaaggccaaagtaaggttgcctgggaattaagagtactggagtcaggcaggctttgatcagatccctcccccaacacttcctgtgtgagtgacttcagcaagttgctttactttacctttctgagcctcatttcccttacttgtaacacagaaatatgaatagttactatccagggtttttttttaggatcaaaggagttactatgtgtggagcatgtcacccagaggctggtatgcagcaagtgctttgtaaatagtagcgatgggcactactgaaacctgaatgtctgcctctgcctgtttgcgaatgactccaccttcccaaatcccaacagggaaggtgagtcagcttgagaccacttgagaggcatctagcagaagggaggcaaaacttctgttaaaggataatttttagggaaaaaaaggtaagatgatgactctcatacagatattaaaaatgaattcatcatgaagattttattttactcgtatgatggaaccaggcagatattacaactggttcaaaggaaaagtcaaagcaacacaaatttggagtaaaggagttgaactagtttttctgtgagataaggcagggggaggggagaaatcaattgaaactctcctgggcagcatcctgcccagtaggcacatgtattagttgcctacaattcacaaagggttgcgaaatagctcccgtggaatcagaatctgacagggaggaagagtgtgctcagaaaatgcatggctttctactgaagcagatttttttcccattacacttctagatctctgtgcaccattgtgccagggctgcgaggaaggtggcccacttcccgggatacactacccaccctcaagagagcctttcctgctgcttcttaggcaagtcagctctcttttctcacctcctgtaagcaacactaagtatctggctgttcctttcgtactcgagtcctggccgctccatgacagcacttgtggtggtactgaactgtgatggacactttctatcattgccctttcttaccttgatatcctaaaaagctggtggtctgtcttctctatcttttgtcctggtcagttatcctaactattttgtgtctgtttctgtggattagtaaacggggtccccacccccactccacaaggagaacatctggcacccagaagtcactgagagaatagctgttgctttggtagaattctgcctctgagtggcttgttcttttcccagacggagaggtctcctgacagcagctctcttctttttctttttttttttttttgagacagagttttgctcttgcgctcaggctggagtgcagtggtgcactctcggctccctgctctgcctcctgggttcaagtgattcccctgcctcggtctcccaagtagctgagattacaggcatgcaccaccatgcccagctaattttttgtatttttagtagagacagggttttgccatgtttgccagactagtctcaaactcctgacctcaggtgatccacctgcctcagcctcccaaagtgctgggattacaggcatgagccactgcgcctggctttagcagctctcttctaaagccatctggacccacatttgttcagctcccctcccttggccatgatgaaggcatgcaaaacaaaaaaggcacttttcttattgagaaggtggctttttatagagaatggtgtcatactgttaggtttcaggccagcagacctagtcaggcatgtgacacttctgtgccaggtgtggctatgagagtcaacaggaaaaatgatatatgtaaatggacaggtctttaaataaatgcagttttgactataagagtaagaaggtttctgtgagactcaactcagtacctcctgtaccctgtgggcctgagagaggagacaatgggacaagaagacccagtggcttccttggaagcttttgtgctagctggagagagaagacctacttcctatatgcctagcaacagtccacactgactggactgcaaccaggacatttccagattactcagtggggcttatcttgaaataatagttgatgccatttgttaaatatattatatataccatctaagggtcttacatgccttctctcatttgatcttcatggcaaaccctgtgaggtatgaccaccaaccaccattttacctcagaactcaggctcccagagtttaagttgctcacaggagcccagaaagtaagcgacagaggtgggatttggttctaggtgtttgccaccagcactttaaatcaccaaagctttctggaagctccaacttttcttctcaagatactgaaagacaggtatctggatgggttggcagggcgggtgggaggtgggcgagatttccatcaacaacgggtctaaaaccagcgatggtgagctgggtgattttgatggaacccctgccatacagtctattaatatcataattggagctaaaatttaatcatgatggcaatcatgagttctggggcttcttgatttgggccagcagacacagtctcagtcactagttctccgaatcagagaaaggatgccttcaggctgtgtcttcacatggcttttcctctgtgcgtggtggaaagagagagctctgcgggtctcttcttgttgtaaggacactggccccattggattagggccccaccacatgacacatttaatcctaattacctccctcacagccctatttccaaacagggtattagtcacattagggattagggcttcaacataggaattctgggggcacacaattcagtctataacagagggaaaacagatttgagaagaaaaaagtccaaaatatgcacagtggtaatatctgaagatgtgcgtgcgtgcgtgtgtgtgtgtgtgtgtgtgtgtgtgtgtttctattcttgcattttctaactgtccccagtgagtatttgttactttctaactgagaaggttactttaaacagtgtcttgagcagcagcactccatgccctggtgtagccttttcctggcagatgttccccagggctctgctgctctgccaatgacttattctcagcatgaactcctcccctgccccctaagaggatctccaaacccaggtcacactccccctgcaggtaagtacaggcgtttgagaacagctttattcttccaggaacagctggtcccctcagcagggccttacaaggtggttatgtctaaataaggcacctgaggccaggagatgtgacatggtccatctaataccatggagtgagttagacacagagcaggactggaacccatgcttccaattccccatccagttttaaggcaatcttcttttctttctttctttcttttttttttttttttttttttttttggagacagagtctctgtcacccaggctggagtgcagtggtgcgatcttggctcactgcaacctctgcctccggggttcaagcgattctcctgcctcagccttctgagtagctgagatttcaggtgcccgccaccacgcctggctaatttttgtatttttagtagagacgaggttttactatgttggccagggtgatctcgaactcctgacctcaagtgatctgcccacctcagcttcccaaagtgctgggattacaggtgtgagccactgcacctggcaaggcaacctttttttttttttttttttttggtagaaaatctttgaacttcatatagatggtgttaatgtgggtgagttcagagccatgtgtaaagttccaggaggggagtgcttgctggcttctcccttatccctcaaccagatcccagccccagccactttctgtttctcttctctggataaaactatcattcatcttcacctgtttctattttcatggattactgtctcattcatctcaagtagctcaagtgaatggctgtttttccattggatacaggaagactgagggtgacctgaccctcatggtgtgcttgcttatttgaatgtctgatggttttatgggtgtagtcctgctggagcagaaagaatatctgttaggagcctgcctctgggctctggttctaactgtgccacaaactcatcgtagccttagacaattctcttgtctctctgggcctcagtttacccatctggaaaatgatgggtctgaatttaataccttgagtatcatccagctgtgacatactacaactcaggcaagaagcaaattctcctgacactccatactcctatccagtgttctctgacgtccttccccaagagctgtggtaccctaccctgcccacattatgtgaggcattatagcacataggttagaagtgtggtctctgggccgggtgtggtggctcatgcctgtaatcccaacactttgggaggccgaggcaggtggatcacgaggtcaggagatcaagaccatcctggctaacacagtgaaaccccatctctactaaaaatacaaaaaattagctgggtgtggtggcacatgtctgtcgtaccagctacttgggaggctgaggcaggagaatcacttgaacctgggtggcggaggttgcagtgagccaagatcgtgccactgcactccagcctgggcaacagagcgagactccatctcaaaaaaaaaaaaaaaaaagaagtgtggtctctggagctagacctaagaatccaattcagactctcttacttactgactgtgtaatttggacaagttacttagcatttagcatctctatttctttaatcataaaatgaacatattaacacttacttcctagggctgttgtgaagataaactgagttgaggtatgacagtacctagcatgtagtaagcatcattaaatggtgtctgttgttttcacatattgtaaagaagaaagcttcgtgcatctcttggaatttctgaggacggtgaagccacagctgggaaagtctcagggagccaggagttgctggcctcctgctttgcatactcaaaattgctggaaaggggctatagcagggggagacattttttaaaaatcccagttattgctattcctcatgagtatgtatatatcacctggcatcagtactctgcatagaaagaagcatagctaaagaaaagacactttgcttttaatataacagctgttttcaggggaatagggtggatgaggatagggagtactggccctctgtcctcaggcctccctgtcaccagctcagtcacgtctatcttacaaatccccatctagcaggaagcctgctctgcccttggactatagacctgaagggctgttgttaagttacaacgttcccagtggaaggaggacagtacttaaaagttacaagatgtgggttctgttcttagttcttatggcctgtcagccagggaactcctggccagtagtctcatccttgaacttcttctttttttttttttttctcaagacggagtctcgctctgtcgccaggctagagtgcagtggcacgatcttggctcactgcaacctctgcctcctgagttcaagctattcgcctgcctcagccttccaagtagctgggattacaggtgcttgccaccacgcctggctaatttttgtatttttggtagagacagggtttcgccatgttggccaggctggtcttgaactcctgacctcaagtgagcccagccctcatccttgaacttcaaatttccaccccaccttactcccacaggcatataccagttgttcctttttctctgttcttatgcaggaaatggcctgaggtccaggagtccccttggtcccctttttccctcactctcaacattcaattagtcttcacatctacagccgacaattgtaacttcttttctttactccattatttcttaggtgacaacaggagcttctttgtggtcttcttttttctaaaaacactaattcagaactctagcatgtttagatcttccttacttaaaaccctttcctggtccccataacctactgaagaaatcctaagctccctggcttggcctctgtctacatttctctgatctcttccagctctttctctgtatcctagccatactgaactacttgcaattcccaaacagggtacacactgtactagttgttcctgcaagagacaggaacacacatccccccacactagcttaacaaaacaaaaaatgcatttctctctcatgcaaaagaagtccaaaagtagacattccaaacttaatatggtgttccagtgtcagaatccaagttctttctactttgtgggtttgccgttctcagcatatgacttccactttatggtccaaaatgactgctcaagctccagccatcacatccacatttcagccaggaggaagaaggaacaaggaaaggcataaccttgcctctaaggatagttcctggaagccacacttgcttacattccattggccagaattagtcacccagccatatttatctataagagaggctatgaaatttttttatttcagggagtctattttaggttgccatgtgcaaaagtaaaaaccagaggtgttggtggtcaaggaagaaatagcgaatggatgctgggtaacatctggcagtctctgccacacactcacacattcaggggtttgcacgtggttccccgtgtctcagacaccccctctctcatgcttacagtctctgcttggcatcttcttttttgccccctaacacttgctcttttttttttttttttttttcgagatggagtctcactgttgccaggctggagtgcagtggtgcaatcttggctcacggcaacctccgcctcctgggttcaagtgattctcctgcctcagcctcccgagtagctgggactacaggcacccgccaccatgcccggctaatgtttgtattttcagtagagacggggtttcaccatgttggccaggatggtctcaatctcttgaccttgtgatccacccgcctcggcctcccaaagtgctgggattacaggtgtgagccaccgcacccggcccaacactcgctcactttatggccatcctcatactacctctgttgttgcaccatcacagcgtgttaaccattgttcaattgtccacctttcccactaccctgtgacctcctggagggcagggactgtgtctttcctttggctccttagcacccagtatagctgcacaatctccagccaaggtagaccgaccaccaatatttcttgtctcaaagatatattgaggaaatgagagtatattcttcaggcttccaggaacttccttacatctgtaggaaggtatgggcatggggatagctcagtgattgtagaggctcgtggcagattgcttgctattctttgggttgcacacaggccgtctctcttgccatagttttttccagatactgcagtgacattgattaggtctcagccttggcgatgtagactgaggtggagagggattattgtcatgattcttgctttcgtttcagtcagttcttgatttgatttctgccatttattcctctcaatttttacctgggcaacatcatctcccgcctgctttttaaggtgaatgttgacagctgatttcatatattaattctggctttcttaagagggacatggctcccttcattcttaagcctttggggctacttttctttctcattcactcatgatctccatttgatccgcaagacagctcatatttgagagagcagagcaaatgtgttattcccatttcaccgatcagaaaatgagggccggccgggcgcggtggctcatgcctgtaatcccagcactttgggaggctgaggtgggcggatcacgaggtcaggagatcgagaccatcctggctaacaaggtgaaaccccgtctctactaaaaatacaaaaaaacccccaaaaaattagccgggcgtggtggcgggcgtctgtagtcccaactgcttggaggctgaggcaggagaatggcgtgaacccgggaggcggagcctgcagtgagccgagatcacgccactgcactccagcctgggcgacacaggctgtgtcgcctttttttgagactccgcctcaaaaaaaaaaaaaaaaaaagaaaaagaaaatgagggcctagtaagattactcttatttgctcaagatcataggaaagttagtggcaaagccaagagttgatcctggatccttttgtatccaagaccagtatcttttgcaaatacttttctttattttgataaataattaacatttacatgcattattttcccccagaatttgaattttttcttaggatagattcctaaacatggaagtattgagtcaaagagtataaatgtgctttaaaaaaaatgctcttaatacattttgcagaattcttcaagcaaggttgtcacactcatgtttaaggcaggtataactacccatgtgcaggccagcccaggagccagtgtggtggggagaggccataaccagccattgctggttccctcagccagcagaggcacacatgagcttctcaccagcccggtgagggtctcctgttgggaggtgtgcatttttgcatgcactctggcctctgcacacaaactgaatatttcatctggtgctcaaccacaagcacagccatctgttccgtgttggaacagatgtgttggactgtgttggctgtgttggactgtgttggctgtgttggacttcgtgagagagcctatgtcagtctccatcaggatgtgtatgtagtgtactggactctctaggtgattgaaaggattccagagataattttgattatatgagtccctgacttcagactccactcttgtgaccaccacacaagctgtgactccaggaggctgggatgccgtgctattttcactgtacccttgcccccgtaatctcaaagcctgactggatggaaccctttctattctatggctagtggcttgtgataaatgtcctttcaggtcaacacagtgcaggctggtatctttacctttctttcaccgaagttaagtgctgcaccagaacttagaagcctcatggggctctggggcctcaggctgtaccttgtgctatgtcagctattacttcatgtcaaacatttgcatatgaatgttcaagcgacagcttatctctttcttcctgcagttggttaccacagagaagcgcttcctcaaagacagtttgtacaatgaaggaatcctaattgtatgggacccatctgtataccactcagatatcccaaaggtaagtgggtgtccgtgggaaataggggttgagtttcctgtctgtctacagattttcctgatttcctaggtttttaaagtcatggctgacattggctattcctaaaggctgggtatttgagttttagggtaccccatttcatctggactagcagattcagaagtattcctgtcctataccagctactctctttgccgtgccagcactgccaggtattgtctcccagttatagtatttactgggatagtggctggagttcccagcatctggggtagattgttcattaatgcaattattcgtgatgagcatcagcagaactcgagagtagttgccgttactcctgtaaataatattagcacacttttatttcacacttccaatatccagaattcttcccatttcactctcataacaatttaaggagatagatggaagtgtggttgttcccattttacagatggggaaattgaaatgtggagaatgaaagtcccccattccaggacttgatttactaagcagaaggcgcagatctgcaacagcagctctttccggggaaggagacatgagtggcaggcctgctggattctaacctctctggaatagtcctctcactgttaatgcatgtcagttgacctctccctgatgcaggctgctgtggcctcaggagcatggcctgagaagggcagagagcactaatcttgggacacttaactcttaagttggatctaccaatgcctgacaggctctggcgacccctggcaccctcactatctgactttcaacagttttgcactgatctcacttagaactcaaatttgcctaggtcaggacaaggactctgaacccatagatgtcctatgctctagttttctcccctttaaaaatgagagatggggccagatggtacgtggggctcttttcagctctgagagtgttcccggactctgatcctgaagcctgaagctgatcttgggtcgccaagctcaactctcccccaaagcacaggctataggctaggccccaccctgctatccagtgaaacctgcggctggaagagaaacctgtagtctgctgcaagaaaagggctgtgcctcaggagcaacacttgttgatcctttcccctccccatgtccactgatgaagatgactcctggggggagcagctcactggcccatttctcccttgagaggaccacttctttctttttcagtggtaccagaatccggattataatttctttaacaactacaagacttatcgtaagctgcaccccaatcagcccttttacatcctcaagccccagatgccttgggagctatgggacattcttcaagaaatctccccagaagagattcagccaaaccccccatcctctgggatgcttggtgagttcatgtcggggaaaagaccttgcatgtttgtttctagaagagatgagctttttttctggggtctcattcagtcattcgtttgttcatttgttcactaaacaattgctaggattctgctctgcttgtagaccatgccaagttctatctaaaatacagagggaaatcagatagaatcctttttcctgagggcatctattggggaggtcaatcagatgtctgaggcaatattcaatttgtgccagaagggagagacaacctggtgtcataggagagaggacaccttctagctggacagttgcttatagcctcatggaggaagtagtgttcggtaggctttggagaggggagaatttggcagaggaagatggagggaagggaagctatgaacaggggagggaggtgggaaaatgaggagcggggctgcacctcagacgaggggagcaaggcacttttctcaggtgtacaatttaagggcgtaccccttaaaaactcagtcatcaagataaataatatttcactacagtatcttcagaaaacacaattaatgtaaaaattatgatgagtgaaatatcaagtatttaaataaagataggatcagtaacagtgctgtgcagagtttattggaacaatgctggccaggggcccccttcttggattttctctacatctcatcattcagactgtggagtgctcctgttccagctgtccctttgcccagctaagggaagaaaagtcttccctccccaacactgtttcatgcaaatgctataaggaaaaatctgctcccaaatagcaccatccaagaggttctgcaggatgtcacagtgctagaaagtgctaactacacatgatgccactgtctcctcaatcagctcagtaatcttgtcctctttctccaaataaattattccatggatacattcattggctgattgatggagtcatttaatctactagcatttagggaggatctattattcaccaggccctggcctaggtgctggggattcaaaggtgtataaccctcacacagccctgcatcctaaggaacactgctgggcttggcttgctgaaacttagattgggaatcacagtcataaatagaaactccagagggaaagctctccaaatttggggtcatgagctgctgaacccactgggcagagctctggggtgctggggtgggttgtcaggcatgactcacctctgctcccctctccaggtatcatcatcatgatgacgctgtgtgaccaggtggatatttatgagttcctcccatccaagcgcaagactgacgtgtgctactactaccagaagttcttcgatagtgcctgcacgatgggtgcctaccacccgctgctctatgagaagaatttggtgaagcatctcaaccagggcacagatgaggacatctacctgcttggaaaagccacactgcctggcttccggaccattcactgctaagcacaggctcctcactcttctccatcaggcattaaatgaatggtctcttggccaccccagcctgggaagaacattttcctgaacaattccagcctgctccttttactctaggggcctctgtcagcaagaccatggggacttcaagagcctgtggtcaggaaatcaggtccagccttccctgtagccagacagtttatgagcccagagcctcctgccacacacatgcacacatatctagcattctttccagacagcatcctccccgccttccaccttggtagatgcaaggtctatctctcccatcagggctgccaaagctgggctttgtttttcccagcagaatgatgccattctcacaaaccaatgctctatattgcttgaagtctgcatctaaatattgatttcacgttttaaagaaattctcttaaattacaattgtgcccaatgcagggtggctctggggggcaagtaggtggtacaggggattggaaacatgctccgcgcctccagagaaaagttgctcccgaggtccatgcccctggaacgtgttcctatcactctggctggttgggctggtccttagactgggtgcttatgattaaagggtcttggttagcccactttccctctccatgtggagatggaaggtagagaaggatacagtgtctatcctcaagttgctacggttcagtgagagaggcagacatctgaacaggcaggtaggattcagtgtgctcagtgcactggggatttggagagagatgggcttgctctctctgtgcacccaggagggccacgcacttaaaactgtgtttgtggatcagagaaggctttatagcacagggggcattcagatgagtcttagaggaagagaagaaacatggcaagcagattacatctgagccgtttgaattgtgtttttctttcttcccatgtttattttctaagatctacctgaacttagagactcaagatatttttttaggaaacctcctacccatgtctgaggtagcaagtgcagcctcacgacagataccaggcaatccagagccacaaaacgtgattcctccaggctctgcctggcctgaccctgtcctgtcagctgggtttacataccagtcccattcttccttttcaatacctacccccaaatcttctcctaaccaccatctgttttttttttttaaagcattttttgctttaaaagcatcctgaccccaatttctttgagctcacgggccttttgctgaaggtctctcagggtgtagtggtgtggctctctggacttaacgtcactctcagaggtcagaaccttggagatcagaactgattctcaccaggtgtgagaggtgtggtagcagattgcaatgctctgcacctcttccttgcaagtgagcaacttcaggctctctgggcagaggctggcccactgtagtttgcagacatgctctccagatggttttactaagtcccctctccctgatagggaatcctgctggaccagcgcagccctggtgtggagaggttaaaagacttgcacaggatcaccaagtcatgctgtagagccaggattcctagacccagggctctgcactctcaaggctggccccatgtgctcaaggggatctaatgtttgggctccaaactaaccatctcggagctgggctcctcatttactgccaaaccctcagcttatgtagctagaaagggccctggagtgagaaagcctggattttcaaattgatgctcccctactgactagctgtgccactctgggcaaatgctcttccttgagcctgtttccacacctgtaaagtggggatgatgatcctatctcactgcttttgtgaggattacaggaaagcacctgtcctggctctgtacctggcacgtagtaggtgctcagttcatgctggtttccttcctgcctttagtagggacctgctctgtgctcacacctcggctgcatgcaccctgctgtgacggaggctagtgtggaagaggtcctgtcctcagggaattaactgtcttattgggagacaacaactgtcctccttggaacacccaagaaaccatgcaaagcagtggacaacacagaacacgccctcctcctcgctgcctgcagctccaatctgattctgcttgggaatgggcggagcacgtgggctgcttaactgctgtataggacaagccccttacccctctctgggcccatgaattcctggcttggtttatgttctgatttgacacactgattttaatcttcgaatcatgacactgagtgcagaggaggtggcattccgacagcaggacatacatgttggtgtgaagactgggacgacactgggtagaatctagtttttaattattattaatataaaggatcaaattaatttaaatatgattctgaagtctacagaacttttagttctgtgctgtctatgtggacactttggtaaaatgcaaattatgatatggacgttatcattggtctggtgagatgtttcatatttgtgacagttaatttaaaaattatgagttaatgctgcctgtgtctatggggttctgtcttctttgatagccatctattcatctggatcatgggaccctctctaatccttccaccaatcaaataagctattgctattggtttggagttgagatatcagtctcggaaacttctgaaaaatgctaataattacccaaggattatgtcaaattttaaaataaatgtgtgtgtgtttctttaa

SEQ ID NO: 327 - DNA, 6986 bp, Homo sapiens
cttctaaagccctgatgcacccacccttaagtggaaggtaatgcttctgctgggggctgtgcgttcttccactccgtcccacctttgccgtggactaaacaggagccactgaacgagagtaccctggctcccggccctgcagattttcaccaaaaactctaggactaagttaaagtagggactgaaataccacacagagctcgctgtaaaccacccgctcagcgcagtaagtcgggatagtcagtagatctgagcccttgagggaggcgcctccccctcctccgcgcagcccccgggcgcccggcccagcttcccgcagccagggtgtattgaggtaggcgcgcccagacctgagacgggttgggactgggctgcgtcacgcgcgggctctaagcgcccggggccccgcccagtggccggcacagccaatcgcagcgcgggaaggcggtgggggcggggaaggccgcctggaaacttaaatcccgaggcgggcgaacctgcaccagaccgcggacgtctgtaatctcagaggcttgtttgctgagggtgcctgcgcagctgcgacggctgctggtgagcgcccccgaccagaccgagggacagggcgaagggggactggaggagggaacccccctttagggacactgagaggaggcgggcgcttctgggagtgagagcttctgcccggagctctgccagcctcgaggtggggaacgggggagggcggttggagaccccagggaggcgccggcaccactgggagggcccgggcggggcaggtcagtcatcctgtgggctgaagccggaccggaccgggcggcttcatgcccccagcctggccgcggagcccccgctccctgcaccgccgcaaacattctcggggcgcggcggcgcgtgcagagggcgagagcaggcggtgcggccccggtcctggcccgcccggagctccgggagctgcctgcctcggtccgggccctggccctggggcccctggcttccagcggcgcggccttgtgaccctgccccggtttaggggagcgagtagcacagacccaagtgtgggacggcgggaatagtgggtgctctccttcccagtgtctcctggaaagggattcccgaaaggttttattccaaaaggagaggttggaagacatagctcatctcctgctgtgtatcagccaagaaggtgtgaggtggtgttccttggggatccgcttgcatctacttgggatggtacgtcttcattagtgaggttttgcctggatgacctcagtacaattggtgcaaaacctggaccaactctttcctagttttctagttgttgccttaagcttctcacccgtcaggtatctttcacacccttctcataccctaaattatcgcatatgctgtttcaacgcctccaactctgcaggctgcttttaattttggtgggcccatcaaatacctccacttggcctgtttcagcctcttccacagtccttggggaaatgctagggagaataattgaaatatttctattccacgggggctgtaagatggctttttaggattggtctaatcagatactcatttcttttctctttctaggttttgaaacatgaatctttcgctcgtcctggctgccttttgcttgggaatagcctccgctgttccaaaatttgaccaaaatttggatacaaagtggtaccagtggaaggcaacacacagaagattatatggcgcggttggtaacatctgaaactgtccagagggactctggagagaatggtcctcgctgttgggagttgatagccagagagtagcttctagacaccagaccttaccaggcaataacctaacagcacccattataggtgcaatatgggcatatatctccattgtgtcttggcttggagaacagctcccagagaagtatcaacccatccctggccatggtttctcttccatttctgcccgcaaatcggcttggtgaacatgggttgggtaagtagacataaagtccaccagctatatgtttgcctctagaatgaagaaggatggaggagagcagtgtgggaaaagaatatgaaaatgattgaactgcacaatggggaatacagccaagggaaacatggcttcacaatggccatgaatgcttttggtgacatggtgagtgtggcaaggattgctgaactctgtgctgcttctcagttcttcaccaaaatagtcttgcttttaacattttatttacttctccttgaagaccaatgaagaattcaggcagatgatgggttgctttcgaaaccagaaattcaggaaggggaaagtgttccgtgagcctctgtttcttgatcttcccaaatctgtggattggagaaagaaaggctacgtgacgccagtgaagaatcaggtgagacagcgtcagattcagaccctgtctccacaggaaagccaagaaggaattggtgtcattgctgtggtagatggtggcacaacatatggtgatgggttttttgtatttttggtttttggtgttttttttgtttgcttgtttgagacggagtttagctcttgttgcccaggctggattgcaatggcgtgatctcgtctcactgcaacctctgcctcctgggttcaagagattctcctgcctccacctcccgagtagctgggattgcaagtgctcaccaccatgcccagctaatttttgtgtatttttagtagcgacagggtttcaccatgttggccaggcggatttcaaactcctctcctcaagtgatctgcccgcctcggcctcccaaagtgtggcgatgggttttttttttttttaaagaatattaaggtaattcaattatggggtactgtatttgtattggtcttgtaaatttacagctttttttttctccctttttagaaacagtgtggttcttgttgggcttttagtgcgactggtgctcttgaaggacagatgttccggaaaactgggaaacttgtctcactgagcgagcagaatctggtggactgttcgcgtcctcaaggcaatcagggctgcaatggtggcttcatggctagggccttccagtatgtcaaggagaacggaggcctggactctgaggaatcctatccatatgtagcagtggtaaatggagctccttatcttgtcattcgtgctctgcttttggaaagtggaacactttcagagataacagatacttttttcagaattcacattttatatggtagaatctacatctgcaaaccgtgagtattgtcattataaattattagcctttggccaggcgtggtggatcacctgtaatcccagcagtttgggaggccgagacaggcggatcacgaggtcaggagatcaagacaatcctggctaacacagtgaaaccccgtctctactaaaaatacaaaaaaattagcccggcctggtggcgggtgcccgtagtcccagctactcaggagactgaggcaggagaatgacgtgaacccgggaggcggagcttgcagtgagccaagatcgcaccactacactccagcctgggccgcagagcgagactccatctcaaaaaaaaaaaaaaattattagcctttgcacagttctctggtgagatggtcaacagctaatggttaccatataagtaccattagatggttaacacacagctgttcttgcttttacataacatggagaataagcaaaccattctacatataatagaactttatccattgtgaaaaattttttatggacagattgacctaggggttctcattgaagaaatgtcaactaatttttcattttcaaatcaacaaatagcattttatttcatgggacgatttataagggtgttgatttggaaatcctaggttgcaaattgctgagtgtttcggttctagaactaatgttccccaggaggtagatggtagtgatcaagtctctccccctttaactttaaaaggatgaaatctgtaagtacagacctgagaattctgttgctaatgacactggcttcacagtggtcgcacctggaaaggagaaggccctgatgaaagcagtcgcaactgtggggcccatctccgttgctatggatgcaggccattcgtccttccagttctacaaatcaggtaagtgtcattttattatagaaatttaggcagaattgggaagcatcactgtgattgattcttggatatgacatcctgctttgcaggaatgtagtattttgagagtgagcatttaacatagtgatgtttgcatttgacatgagaaaatacttagttatgttaaacttctcataaatatttttaaatggctatgtaattgtatagagacaacctaattttccaaactattttccagttgttgggcctttttttctcaaagttttttactactgtaattaggactgtaaagaatccccttcaagtttttgtttgtttattttggtgctattttagactgacatcctaggaacagaaagggattatgcgagttggtatttgggctcagagatatctaaatcaccttagctgtaaacaataggttttatcttttggattttcattttttttggtagaaaatatcttgaacttagttgaagttagttgatttctagtgagttgaggttgacttttttcctttatcagccattactgttttccggccaatattgtttgggtccttatttggcatttgtttatgacattttactgaatttagagatgcctcccttatggagggtggtagggtgggttactgtcacatgtcgcttggagcttctcaccccagcattaattttactctcccaggcatttattttgaaccagactgcagcagcaaaaacctggatcatggtgttctggtggttggctacggctttgaaggagcaaattcgaataacagcaagtattggctcgtcaaaaacaggtataaaactcaaaattgaaaagggaatttttgttccaaatcagtatttggatacaagttcacaaaagctcaatttcaaaattccgaaagtctttcttctacttagagtgaacacagaaatattaatgtttgattataagattccgtaccaagctttttggagttattgctatgtatttgtaatattttattactaagttttgaaaatttttaaattctgaaacacattagtcctcaagggtttcagacaaaggactgtggacctgtaggtttgagagctgattgcttttttctgtctaatttttcaacaaggaatagtaagcagaaacatctgcctctgctggttctttgttaagtctgagagatcatccgggagtccagtggtctgtgtgcatccttctattgtcattggatgccctgtcatcgaatttcactccccagctctcaggctttgaaggttgtcagaatctattttctcacaattagcattctttaattgagatgtgacataaggtagtatgtggggacagactgctacagtggaattccagttctgcctcagtatcttaaatagttaaggacccacaagaatcaatatattcattcattcatttgtttatttattttttgagacagagtgtcgctctgtcacccaggctggagtgcagtggcacgatctcagctcactgcaacctctgcctcctgagttcaagtgattctcctgcctcagcctcccaagtagctgggactacagggatgtgctaccatacccagctaattttttttgtattttttagtagagacggggtttcaccatgtatgccaggctgctgtcgaactgacctcatgtgatccgcctgccttggcctcccaaagcactggtattacagacatgagccaccgtgcccagccagttttattttattctgagatggagtcttgctctgtcactcaggcaagagtgcagtggtgcaatctcggctcactgcagcctccacctctcgggttcaagtgattctcctgcctcagcctcccaagtagctgggactataggcatgcgccaccacgcctggccaatttttatgggggtttttttgtttgtttttttcttttgagatggagttttgctcttcttgcccaggctgaagtgcagtggtgcaatcttggctcactggaacctctgcctcctgggttcaaatgatgattctcctgcctcagcctcccaagtagctgggattacatgcccggttaattttttttttttttttttttaatttagtagaggcagggtttcaccatgttggtcaagctggtctcaaactcctgaaacctcaggtgatccacccgcctcagcctcccaaagtgctgggattacaggcatgcaccgcacctggccaatttttgtatttttaatagagacgaggtttcaccagattggccaagctggtctcaaactcctgacctcaagtgatctgcccacctcggcctcccaaagtgctgggattgcaggcgtgagccactgtgcccagcctcaggacatttataaatggatattaacagcatttagaatagtgcctgacacatgggaagcactgtttaagtattagctattattattaatggagccaattttcccttgattccttgtataaaatggaaaacctgctcctctttcagctggggtccagaatggggctcgaatggctatgtaaaaatagccaaagacaagaacaaccactgtggaatcgccacagcagccagctaccccaatgtgtgagctgatggatggtgaggaggaaggacttaaggacagcatgtctggggaaattttatcttgaaactgaccaaacgcttattgtgtaagataaaccagttgaatcattgaggatccaagttgagattttaattctgtgacatttttacaagggtaaaatgttaccactactttaattattgttatacacagctttatgatatcaaagactcattgcttaattctaagacttttgaattttcattttttaaaaagatgtacaaaacagtttgaaataaattttaattcgtatat

SEQ ID NO: 328 - DNA, 24916 bp, Homo sapiens
cctgaggcagagcttggccggacctggcgacccctgagcttctgggaaatggacatggccagcaccgccttcaggttcctgcccagggcacggttccttcaggccggggatcccggggaggggttcttcccctcggccagggtcatcgttttgcgatctctcctgggagtctgggtttggagtctggtcttagccggtagcaactgacgtggcctgaccacccggcccgtccaggtccacgggtgaggggccgcggtgggggtgctcccagcccagcaggcagcgctggacagtgaccccggagcgggaaccagggctgcgctgggcactgaccgggccctggtaccggggattcaccctccccggggtgttcctgggccttgggtcgcctgggtccgctccggcgcctggggaggggtctgcggcttcggaaactcgcgggtctcccctgcccctccctgaaggcggcccttcagcgccgcgcgcttccgcccccacactcgggttgaggagcaaggagagaaaagagcgtctttctctcttgctcaaagctgcgtgtgtgcaacgcgccagtcccaggataattttaactcgcggccggagagaacgcgccgcccgcccggcgtcttttttgttttcgcccaggcgggctgggcggcggcgcggggcgggtggaagcccccccgcccaggtgggcccggctgaatggggggcttgtgcaggcgggggcgggaaggggaaggggaaggggccgcccacctcccgccccgcccgcccgcgcgccgcccgccccgacgccgcagctcagactccgctcagccatggccgggccgcgcgcgtgcgccccgctcctgctcctgctcctgctcggggagcttctggcggccgccggggcgcaggtgagcgcgagctccgggctctgaggctggacgtggagccgcgaccgccccagccccgaacccgccactccggggtgcccggcgcagcctcgacgcccccagcccgtgtcgccgtcggggcgcggagtcgccagcgcctcgggatgagccccgtccggccgcgtcctcgatgggtcctcgctggcccgggtcggccggcgccgccgcctcctctgggagcacaagggggcctttgttcccgccgccggagggaggcgggggacacactgcgcgggggcgccgggctccgcccgaggctttgggtctcaccgaggagagcggcggtcgtcgcaggccccggagccgctcgggacccgggaggaggggacgccgggtcaggcccacgggggcacctgcgctccttaatgagttttctccgtttcagagagtgggactccccggcccccccggccccccagggccgcccgggaagcccggccaggacggcattgacgtgagtttgggggtggggagggccccgagcgctctggggttctggctctggcccccacctccctgagctccccggcctgatggagagaaaaccaggccccacctcccagagccggggtgacatcaggggacagccagtgccttcacgggatgggggtggccctgcggggactgctggtgggtaggggtggagggtgtcatgtggtggtcctccacccagaatgccggcactgaggtgtgtgtctctgggtcccctgaggggcccgtgcccctgtgttcggggttctggcctctggctgaagtggggagaggcacgtcctttgggtggttgggggccgggggtcttgttggaggctgctgggctctggagccagccatggagggggcttaggagccgactcagtcctgagatgatgtcccctatgggtatctcaggactggtgtgggccaagcagcaggaggaggcggctgaaattctacaattgtgcctccctcggagggaccgtctggggtgaacctccccatgtgaccaccaccagggcaggagtcccctcagggcctgtccacgctgtgtggtccccgtggagggctgtggagggctgcaccaagagccccccatgacccaccctctgcccccctgcccagctcggcctcaatggccacagcctccttccagtctgtccagttcacccctttgcccagtgctgccccacacatgggagggtgccctctaggtagggatcgggggctcaggggccccttttgtctgctggggctgggcctctggggctgatttggaggccagcgctgctcttttccccgaggcggggttcttgagggacccctgattttcagggttacatgtgggtgtctttcctcacagggagaagctggtcctccaggtctgcctgggcccccggtgagtgtccctggctggggagacagcctttttccagtctggagagaaagggggaactcagaacagaggggtcattgatatcctgtctcatcctgccggagcccgggttgcctgaggggaggcctcagagggcttggagcaggcctggagccagcggggcgggaggggagtgtgtgggctcagcctctgcatgttcagggcagggcctggctttgaagctttctttggaccagcgccaggcaggccgggaccggggctggtacagcccttcaggtcccccaggcctgaggtcacctggagccctcccaccttcttcagttccaggggttgagggtcctggggctcagagccctgtctgggcccactgggggtccgacagagatgcctgctggcccttagccagggaggccgaggtgaccagacgaaggtcttacagatgccactgagggatggggcgggcagccttcctgggccagcaaggtgtgggcaagcaggacacacgtgccccagctgagccgggtctgccagacagtaggggggacccaggagaggggcccatcccgtatggttgggctggggggaagtggaaagcattttgcttcattgctgaaggcctgggctccaggccagaccccgccttcacatctctgccctttcctcctgcacagggaccaaagggggccccaggaaagccggggaaaccaggagaggctgggctgccgggactgccgggtgtggatgtgagtgcgcctgcccctccccgccatgccccactccccgctccgggtccctggaggagtccggccctaattgctgttgtccagctgggcctgctcaggcgggaagcccagtcctgagagaagtctccagaagtccccaacaggggtcctttggccttcatcccagacgccaccagcatctggcaggggacagagccagcccagtggagtcggaagtcccgccagccctccttgcttgtccaggaatgagtgcccattgtcaggaccttctgcccactgctggcctcacttagtcatcttgggctccaggcctggccccagggccacggagttttgttcggaggaagccgggcctgagaagtgagctgtccagtcctgctgggttggtccccgaggcctgactacagcaggtgcctccgttgctggcttcccgctggctgccccctccctcctcccagagcctctggctacagcaggcagacagtggacagggccaagagaggaggctgccaccctaagggtcttctatgcctctctggactcaccaagggaagggtccgtgcttccatttttgcctggggggtggcatgtgcttcccatgtggcccctcgagctcgccctctgcctctccccagggtctgactggacgagatggaccccctggacccaagggtgcccctggggaacgggtaagtgcctgcgccgaacccagtggcttgggttcagaggtgaggtcccctggccacctctggctgctctgtgtccacaaggccaaggagctggtagttccaaggacagctgccctgcccgtgcctggggtggaggggcagaagggcagggtgccaagtggccagtcccctgtgcctgcctccctgcctcacctccacgtatggtcagagttgtcctggtatccagaccatggcagggagaagggggatggtttgggggaacccaccccaggtgcctcctcagaatgtccctgaagcccccagggccctgggcagaccaccaccagggacccccgggcacgcagcctgcagagtcccctgtgcctgcctgttggacactgaatcctttaccctgacggagcggcaccaccacccaagggtgcctttctccccttgtggcttctgagtacaaacccgaagccagcattctctctttggcttcataagacgtggctgtcagccaaccgggtgccactggccccaggcgcaaagcatcacagagggcaggaaggctgggctggggacacgaggacacagccctgcccttgggacccttgggagctcgtcaggcatgaggcggattctgagctgaaaacaggagggaaacagtagctgctggcagccgagtccgtggtgcccaggggtgtggggtgggctggtccccaggctttcaggaggggcctccagcctcagcacagggcccgtgcgtgccgtccagggaatgaggcatttcaggcagcaggggccagacagggcccagagggtgtggagggcagacagggcctggctgcccaaggctctggggctcgctgacgtgggcgggggctgaggactcagcaggctccgtgggtgggttatcgggagggcttcctggtggagacaggcaccccgggtcacttcggtgcctctcagccctgcctcaggttgcaccttcttgcagcgagcgctgggactctggtgccatctgtctccagcagctccccaggacggcaaagaccctccaggtcaagagggctcagaggccctgcccctctgtgaagtggggacttggaccctgttgtcctgggagttggagttgtgacgtcacacttcagagggaggggattgggtttgcaaatagaggcccagcccaacctagacgcctgctttcctcccacagggaagtctgggacccccggggccgcccgggctgggggtgagtatggagtgtggtcctctcctctccatgggagtttggggagctggagagtctggtctaaatggggtggcctccaggaatcccagggaccatccctggccctctcatctgcagcctctccggaggctggtgcctggatggggtcctggtgccctctctgggctgggaccagacacccatccctggaaccgccctttccccaggacccacctgagccatcttagggaggggtgaggcgcagcccttcttgtgcctggcaggctctgaccccatgtttggctttgcagggcaaaggcctccctggaccccccgtgagtactgacaacccttggggccctgagcaagcacgcaagtcccgagagcctgccaggctgggatgtcccaaaccgtgcctgggggtggggcttctcaggggcagccatctgaccaccccatacttggagcccctctcccttcggaggcggcacaccaaccctgggtggggatcctcggggcttccgggtgcagacctccccacctctctttacttccctccagggagaggcaggagtgagcggccccccaggtgggatcggcctccgcggccccccggtgagtggctgtcccagagcccctcagagtgtgctcacctgtggcctccacccccagactcaacagccaggggctcccttcccctctcccttttccctttctcccccaaccccaccttggtgggtgttggtagaagccctggccaatgatccagacccgacctcaggacgcagacaccagcacagtccgtgggagtgggggctggtgggagctgggcgtgtccacctccctgggagaagccgggcacctcactcaggtgggggctggtcccactctgtctaagtcataccccctccccagggaccttctggactccccggcctccctggtcccccaggacctcccggaccccctgtaagtactgggcagaggctctaagaagtgctgggcatggactaggacactgggttggaccctccccattccccctccccaggctccatgcccctccgagatctcctaaccctaacttggccactcccaggaacagtcaatggtgggggcagtggctgtggctaggccagccaacttggggatggtcaggactcaggtccccatggccatcctgccccaaggacaggtggattctgtcgttgtcacatgccctgtgggtgggccagcagctcccagcactggccacttgggggacaggatgaagggtctccaagtcccctggtggatggggaaggttgtggtccgtcagagagtgggtgggtgggttgggtggctgcaggtggctggggagggcgggagaatgtcagctgtctctttttgtcttagggacacccaggagtcctccctgaaggcgctactgaccttcaggtaggcacttgaagccatttgttaagggtgctggggggtgcctaccttggggggaggggttctggcctggagaggggcttgtccatactggcaagaaggcagggcccgagccctccctggggacaggagctcagagcagacagctcgggcacaacctggcagagaggctggctgggacctccccctcccccttcccaccctcctcaccaccgtctagacctgcactgtccctcatgaagccaccaggcgcatggagctgtacaaatgtaatgaatcacaatcatgtcacagagccatccagctcccctgcgtcatccgcagagggcgcccttggccacagatggcgacagaactggagtctgggacccacctttatcttgatctttgagccttgtcatttgcctgaaaagaaaacaggctcaggtcaggcgcagtggctcaggcctgtaatcccagcactttgggaggcccagacaggaggatcgcttaagctcaggagtttgagaccagcctgggcaacatagtgagatctttgtctctacaaaaaattgttaaagtagccagacgtggtggcgtgcctgttgtcctagctacttggatggctgtggtgggaggatcacttgagcccaggaggcagtggttgcagggtgctgtgatcaagccactgcactccagcgtgagcagccaagctcaagcctgtctcaaaaaaatgaagaggaaagaaaatgggcttcggaggccacggatccatctctcctctctgtttggccgtccgtggtggcagtcagcgccttgtttccatagagaggtttgatagttttgaagggaaaagctcggcccactctgacctgaccaccgacgctgtctaccagcctctctcctcaccccaccccggggcctaggtgcctggccagcctgtgtcccagaagggaggctttagggaaccttccagaatgtggtgcgtggttgggcccccgatcgtgggctgagtggggcaggggctgaagatacgggtctgcacccttggcctggcctgcccattgcagctgtaggatcatctagaagcagccctgggtttcctgagcatcagacctgttgcctgggctcacagtgcccctcctaaaagccccatgccgagcacattcctgtgctgaggatgggcccgacctgaggctgctgcaaggccccctgcagtgccggccgggactgtgctgaatggctgctttgatagccagtgtctgccgtggggccggctgctccatgcagcccctgctgcacttggccagtgctgaaggagaccctgtctgtgtcctgtcccagtgccatcacctgtacggagtggcctcctggggtcccgtcactgtgtggagtggcctcctggggtcccgtcactgtgtggagtggcctcctggggtcctgtcacccagagtgtcccgacacccgcgcggagtggcctcctggggccccgtcacccacgcggagtggcctcctggggtcccgtctctgtgtggagtggcctcctggggtcctgtcacccagagtgtcccgacacccgcgcggagtggcctcccggggccccgtcacccacgtggagtggcctcctggggtcccatcatctgtgcggagtggcctcctggggtcccgtcactgatgcggagtggcctcctggggtcctgtcaccatgaggagtggcctcccggggtcccgtcaccgtgcagagtggcctcctggggtcccgcgggcgctgacccctgcgtcggacgtcctgctctgtttggctgggaggggtctgactgctctgttttccgacagtgcccaagtatctgcccgccaggtcccccagggccccctggaatgccagggttcaaggtgagtcacgggtgactgggacccaagcaccaccctgtgctgggcaggaggcagctgggctcccatggggctgtggaggtggcgggtccagaaagctggaccctggttccagggttgccccaggaagaaagctaggccagcctccttgtcccgccttcagcaccccagtgacacgctgatgtggccaggctgggactggccataggcgtcagagactgcgggggagagctagcctcaagctcccaccccagcccagccctggcccgctcctgaccgcagagcgccctcatgtgggtcctagcgcctctcaggcctcagtttccccatgagggcccagacccgcggtcctgtgcgctgccgtgtggcgggccctgggctgactgaccctgcaggcctcacttcagtgttgccagggagggggtgtcggggggtctgggtggggcagtgaccccacatttgcttgcagggacccactggctacaaaggcgagcagggggaagtcggcaaggacggcgagaaggtgaagctgccgcacagcagctggggaggagctggggactggaggctgggctccggcgggagggaggggctgggctccggcgggagggaggggctgggctccggcgggagggaggggctgggctccggcgggagggaggggctgggctccggcgggagggaggggctgggctccggcggtggggagggaccgtttcatgggtgcacctgcactggcaccttctgtgcctgtcttccagacagggcctggctggtcagagctgggtgatttaggcagggtccctggacagaccccgtcctgcctggcctcgctgtggaagctccctggtttgtgtctgtggccggggcgaggggcatctgtgaggatggctggctttagcctgtagcctcccctcacctgtggtcgctgtccgtggagggtgtctgtccatggtcacctgcaggccgggggaccaggtctgggatgccctttagcgtggctggagtgatcagatgaggagaccccaggtgcacatcagaggggtccctgcttggccacgaggaggggcctggacagggctgaagggccttgtgggaacagtgaccacggaccccggcccggcagggcgaggccaccgagactcgcgggactgctctggaactgtgggcaagtgtccccttcacagagcctccaaggcccagctgtgaagggggcaacacccccagctgcttgggcttgagtagggtgactggaggcaccgaaaggtgcaaggagagccagactgggccgctgaccaccctatcccctctgtttcagggtgaccctggcccccctgggcccgccggcctcccgggcagcgtggggctgcaggtgaggctaggaaggggtaaggatggtgggatgggaactcagcccacagagtgatcaagccctgcacatatctacccccgagggggccagctccggctggggggtgtttggccaacacccaggcacaggagcgcgacctggctgggggtcccacctctgccaaggctgctgacctcaaggctggtgccccctccctctgggggacctgagctgaggctgagggctcatggaagacaccagggctcccaggggtaccccgagggccttggccctgggtgctccccggggtggaggtgcagccccagcctctgcatctgtgcctctctctcgcagggcccccggggattacgaggactgccagggccactcgggccccctggggaccgggtaagtcctgcagcccctagtgggggccggccaggtggctgggggcctggttgtctgcacctccagacttcagatgggccccgtgagtgacactctgaagcagccggcaccctggctctggccatcgccactgtggcgcaggccttgctctgggcccctgttctcgcatgtgcctgggcgagagctgacagtcggcgctcactgatgcccgcacgcggtcccaggctgctgtgagggctattcacgcgtgtgcccgggcgagggctgatgaactctgctcgctgacacccacacacacggtcccaggctgctgtgagggctgttgtggcttaggccagagcaggaggggaagcagggatttggagactactaggtggcatcttgggggaacttgctggggagccctagaggaagggctgcttgtgtctgggccgcccctgagggagcactggggggatgccagccaggcctcagacaagaggaccccggatcccctctctcctctgcagggtcccattgggttccgagggccgcctgggatcccaggagcgcctgggaaagcggtacgtgtgtcagtggacggtgggcgccatgcctcgtgacctctctcccctttccctctgctcctctcagacgcccccagccccactggggcccctcttctgtggctgagctgttccctggacaccctgggagggcttgtggcatgggtacgggggtgcttaccaatggaatccattctttgtgagacattcgcctcctttctggttctggacgtggaatgaggggtcaccatcgtccctctggcacctccagccatctctgaccactcctggagggcccaggcctggaggggcccccatcccactctctgaccactcctggagggctgtcccccgcccgggcctggaggggcccccgtcctactctccgaccaactccatggtgttaactctgtccctgccccacctcatcctttccagggtgaccgaggcgagaggggcccagaagggttccgcggccccaagggtgacctcgtaagtgagagggaagttggttccctgggtccttatgtggaagaacccaatttccctcctgactcgtgctggggagggggacacacttgggagtgagactgcaaggggctgcctgggtgggcctgggggtgcgtgggggtgagcctgaccctggagggcccgagctctctccctggccccagccgttctcccagagccacatgggagctctgtggccccctgcagagcggcccacgagccgggtggagggaccaggctccagggcttggatcctgcccccagagaaaacggctctcgggttgagcaagtgaacataaggaaagtccagaggcagccaagcgttccaggagtggaactgaagtgaccgtccccagactggtcagcctccacacctccctcgactgagccctggcagccggagtgcagggagccgccgtgccgtcctgcagcatctgtggatccaaacacagttttctccacgcacccacaggccccagggtggtggtcgggggtggcccctgccgctgcccaccatagctccttggtgtccccgagcagctggccggagaatgcgtgaggccgtctgggaagagactgccactgcttctgtcacttgtgtgtcctctagggcagacctggtcccaagggaacccccggagtggccgggccaagcggagagccggtgagtgcacgtggctgctcatggaatgctcctcccccgggtcctgggtatgtacaggtggagatggcattcagaagggctggagctcagtgccctctgctgtggccatcttgaaatctgggttaacggtggaacagccccgcagccccacacatttctctcttgcccagagcctcacgagtgtgcaggagtaggggcctcaggctgggtttacctgcacagaggacacgggaagtaagggtgggtgggtagcaccactgggcagaggtgggcactcccagggtcccgggcacccatgcgggcaccttccttcctgctgggtgcccaccctcagcccagacctgagctcccttctagcccctcgtgttgcctctgccccggagtagtgccctgtcttgggacacccagcagttggctgtgtcctgattccaaaaccagtccagggtggacgaggcaggcctggcctaaggcctcagtttccccaccgtaaaatgggccagaaccaaacttccttagggcaccatgatgtgcctggtggacgaggcctcgggcgtcagcactgcatcagcaccgcctctgccacccacccgcacccctcacctgtgcggtcaccgaggcagcactggttgccacacggccaccttggtcatgaaaccagataactgccagggtgtgggggcagacacagttttaggttgatggggaaggaggctgcccccagggcaggactgtagagggagggaggggggccactgcccgacgggccttactcatcccttgtccccagggcatgccgggcaaggacggccagaatggcgtgccaggactcgatggccagaaggttggcatggggctcagggtgtgacgggagggagggggctggaggggagttcggcctcccgaggcctcagcctccccttccgcaccccaatctctgtcctcacagggagaggctggtcgcaacggtgctccgggagagaagggccccaacgggctgccggtgagtgcccggcgggtggggccagcctggggcgccacagcttctgcctgctcagtggcccatgttgggctgggtgggttggtcactgtagggccgactccctgtgaggggttctggggcctgtgtccatcagggcctggcacaacccctggtgcccagtgggtgctgtggacggttgcctgtatgtttgcatgtgtgtgcttattcgtgtgtacatgggacatgtgtgaacatgttgatggccatccctggatgccgtgcggtcatcacccccatgggctctgagtaggggctcctgcatccaaggccagggaggctgtcaaagccgcacctcaggtccacaaggctgggagaagttggccctgcctttgggtgcactcactctggcccctgcaccctgcctgcgtgcacgcccctgggtgctgctgccggcgtgcaatgtaactggcagccctgaccgcaagctctctcctggcagggcctccctggacgagcggggtccaaaggcgagaagggagaacgggtatgtggctgcagccgctttctctctgggaggggaggcgaggggccgggaggcaaggggctggggggccagcgacctggccccagtgcaggtgtaggcaggcactcacagctctccttcctctacagggcagagctggggagctgggtgaggccggcccctctggagagccaggcgtccctgtgagtatctgcggcgccccagacccctccccatccagcctgtgtgcagaccctgccctgacaccctccttcctttccctgtagggagatgctggcatgcctggggagcgcggtgaggctggccaccggggctcagcggtgagtgcagggacatggcccggggtcgggggttagcactgagccattggcacatggccccagtttctgagcaggccggggtggcatttggttgccttgatgggccaggcccacaaaagcctaggatgccaggaggtgtggggccccatcttcttgtccctcacccgctgggagacggtcggggccaggccggagctgccctgttttcaagccttctatgctgagcccagccttgtgcccccatagactgagataatgacagcaccagccacagggccctggtggggggagccaggggcatgggtgcctggccccgagtctggcctgacaaattgggtccagggtatgcctgagttctgagaccccctaaactgccctgggaggtagccctgcctttgtccccagcaacccagccaggtggcttagaaccggctcctgtgtccacccactctgggggaaggctgagccaggctccctggggcctcttggggactcctcgaaccctgagacatccgctcacacctcacctttgtcttccagggggccctcggcccacaaggccctcccggagcccctggtgtccgaggcttccaggtgggtgaggttggggcaagggcctggcatggggggcggcacacccagacgggccagacccgacagggtatgggcactgacgagccaggacctccttccccagggccagaagggcagcatgggagaccccggccttccaggcccccagggcctccgaggtgacgtgggcgaccgggtaagtggccctctcagcaggaagctcccctgcaccccctctacccatgtaccacagtcccccacccccatgacagtcccccaacccccaccacagtcccccaacccctaccacagtcccccaacccccaccacagtccccaccccctaccacagtcccccaacccccaccacagtcccccaccccctaccacaatcccccaccccccaccacagtcccctgggacgcagacagggagaggcccttgcagctcccagtgggaaatctggccatgggcagtgtctccctgcgtggcggaggcagtggcatcagggccccgactgtggcgcctttggcccctctgaccttccacgtggtgttccttgtgggtgggaggctgcgggagcctgggccgctctgcctcctgccctgcgtagacgcctggcgggacctgcacacggtcagtgttcattcctcgagattggcgtggaggctgaggctcaagagccacgcctgctcccgcctagcgggtgtctgcggaggcgcggttgacagaggatcacgttgctataaaataggtttgaacaccatgtcccaagtgactgtaacggtcacagcttctacctcgtcaagactttttcctgctggtcttgcagcagctgcagcattagctccttgggggtccgggcagaagcggggcacggcctacccagggccccagctcactggaaggagcctgtgggtctggtctgggccccagccatgctccaccaggtccttggggacctcgtgtgcctgctgtggccacctctgctgggcagacagacccctttttagatgtcaatcccgagaagcctccaggacacggctgcagatgccccgtcattccagggtgatggtcattccagggtgatggccggggctgtggacaccaccaccccatgggggatagcgggctgtttattggcctccaggcaggacattccagaggtgggggccatgccagcaacctcagggcctccgagagatggcagggctggcacccgccctgcgggcactgcgcctgtcccaggtgtgggtggggcctggtggctgaatttccctttcactttaaactcacgggaaagtctcctgcttttctgccctttgggccagttctcacttatgtggccatgtgagcaaatggacattttttaaagggattcatagcaactcccagacatgtcctcatttcacaatgccgggggaaggtgattagatgagcttttgcatctttgactctactgtgacggaattatcctgcaattgtgcagaaacacccgcacgaattcacgggtgttacaaacagtgcaaacctaacgggacttcactacccacaaggggaggctggacagagccatcgggcccagaggctgtgaacgtgagcttggcctttgggcctgtgtctgggagccggtgttcacagaagccctttgtgcagcacagatggagatgtggggaggtgtttaccattcctgggcccagggcaggctcactttagggattcctgccattcctctaatccagagccttctctccacatccagggtccgggaggtgccgcaggccctaagggagaccaggtgagctgggcacaggctggggcaaaaggaatgaaggcaaagctgcacagcttctcccaggctcctcctgtcccggctctggccctggctgtgttttcgggacactgagcctcctttctcctcttgccgtgtctgtcagtcgccctttctggctcctgcccctcctgcttagcacagcgaaagcagctctgggcacccagcccccaggcacgccccggcatccgccgctgccttcctgggtgcaaacagctggccagagtgtccctgcatggctctgggtgcaacagaagctgcttctagtccaggaggcaccaatgggaactctcaaagggacagaggtgtgtcctgccatccttccggagaactgacagagggcaggggctaggctctgcgtgtgtgttttgcaggcagattcgaaatgcatttctgctgttcgaagcactcttctttttggaaaagtgtcagggtgggtggggccatggccgtggctgccccgccctcctgcagtgcctgctctcacttctaggcacaaggcctttccataccgctggagggcctgcagccatcgaacccccaccgcaggttctgcttggcagaaaagcctcattatgcaaacaaatgtcttccgttttttggccccgcccctgcctgcaggtctcccaagggctgtgtttggagcgggttaaaaggcagccctggggcctgggcttttggcctcgaccttaagatgaacattacacctacggaggcttgagagcagggactttaaggcatgaagtccctactcatgcatgaacagctcttttaactttggggtgtatcgttttcagggtattgcaggttccgacggtcttcctggggataaaggagaactggtgagtaattaggtaacctcactgttaccaacagctgggagcgaggtcgccactgtggctggggaacagtcctggggacagggtcaaaatctgcagctcccggtggaagatcggcagctctgctgggcagcgtggggatggagcagggtcgggcagaggccttggccactggccatcccttagcaagtgggcagggcctggcagggaaactcagcggctctggagtctgacctgacccggtgctcagacgtgtgggctcccgcactctgccccgtggagtggcacctgcatgaagcagtcacagctgcatttttgtttttttgtttttggttttttggggtttcttgttttttgttttgagacgagtctcactctgtcacccaggctggagtgcagtggcgcgatctcggctcgctgcaagctccgcctcccgggttcacgccattctcctgcctcagcctcccaagtacctgggactacaggcgcccgccaccatgcccagctaattttttgtatttttagtagagacggggtttcaccgtgttagccaggatggtctccatctcctgacctcgtgatcatcccgccttggtctctcaaagtgctgggattacaggcatgagccaccgcgcccggccgggggttttttttgagacgaagttttgctctgttgcccaggctggagcacagtggcgcgatctcggttcactgcagcctctgcctcctgggttcaagcgattttcctgcctcagcctcctgagtagccaggattataggccctcccacagtcgactaattttttgtgttttggggggttttgtttgtttttttttgagatggagtctcgctctttcgcccaggctggagtgcagtgacgccatctcggctcactgcaaccttcccagttcaagcgattctcctgcctcagcttcctgaatagctgggattacaggcgcctgccaccacgcccagctaatgtttgtatttttagtagagacaaggtttcaccatgctggccaggctggtctcgaattcccgacctcaggcaatctgcccgcctcggcctcccaaagtgctgggattacaggtacgagccaccgcccctggcctaattgttgtatttttagtagagacggggtttcaccatgtcggccaggctggtctcaaactcctgacctcaggtgatccacctgcctcagcctcccaaagtgctgggattacaggcgtgagccgccgtgtcaggcccacagctggtttttaactgaagaaaactccacttccacaggcctaaaactcaggtgaagcataaaattacgttcttgtttgagtcccttgataggcacatttctccttctggaggtaacaaatggagcagtcgtgagtccgagggaaggacggcctttctggctttcccgaggggggttttcatctatgattaagtctttcctttgcgtctgggtgaaatagaaacagcctagccccagggaccccagtctctggcagacccccacagcccagtgtaaactttttatgcctggggacaaaagacctcagttgtatgtgtttcatttagtgaattctttttttatttttttttgagacggagtcttgctctgtccccaggctggagtgcggtggtgtgatctcagctcactgcaatctctgcctcctgcgttcaagcgattctcctgcctcagcctcccgagtagctgggactacaggtgcccaccatcacacccggctaatttttgtatttagtagagatggggtttcaccatgttggccgggctggtctcaaactcctgaccttgtgatccgctcgccttggcctcccaaagtgctgggattacaggcgtgagccacctcgcccagcccatttagtgaattcttagacaacactgacaaatggaccctggaaatcccagaagctgccctacgtggccactgttgctggtggggtgaggggcagagccccttgcaggcggaaaacctaaggctttgctctcagctactcgcacggtcgggctgtgtgaggtgaccccctaccctcctggcctccgcggagcatgctgtctgggcccggtcggtccctctgctgtgcggttagactgtgtcagtctgtattctgcagctgtaacagaacaccgcagcttgggtagtttacaagggaaagagatccatgtggctcctagttctggaggctgggaagcccaagaccgaggggtgcatccatcgagggcctccccactgcgtcattccatggtggaaggcagaagggccaagaggaggtgccagagagagaaaggggcccaacccatccttttcatgaggaacccactgcggagacaacggtgttagtttactccggagagccgagctctcaaacctaatcacctcttaatagcattgcagtgcagtggccgttcaattgcagcatgtgttttggaggagacattaacccggctgactgtgtgttgacgcacctggggccagtcattcctgaggacccagctggagggggttccagggttttagggcagagaggttcagcccagcattaggcgtgttagtaagaaaaaggaatggaagcaaagtaagcgtgtgtaagagacagcaccgtgcagctaacaaagtcactcttcccaggaaagtaagtttttaaaaagcttcaatcaatcagtgcaatcacagaaatataaaaaatgtatatagaagaacggaaggaaccactgtcaatatttggatgtagtctaatagcaggtgtgtggatgatttgatttattttatcctcaactggctacttcccacccacccaacaatacacttagttcaaacacacaacttttctcttcacagggtcccagcggcctggtcggacccaaaggagaggtgagtgcccggcgactgttccgatgacaccatccatgggcgcctgctggcttcctgcccacctctgggcaaccaggcagccctgcagggcactgcccagatccgagatgtaaaaaagcttgctctggtcaaggctgggcaagacggctccgtgccggctgggaaagagcacgtcggggtggctctgggctcctgggctcgcccctgacccaccttcctctgttcctctgcagtctggcagtcgaggggagctgggccccaaaggcacccagggtcccaacggcaccagcggtgttcagggtgtccccgggccccccggtcctctgggcctgcagggcgtcccgggtgttcctggcatcacggggaagccgggagttccggtacgtcgcttttccggcttttccagctttcacagggttgagatcgtgttttttccggaaggaagttactttgcggggtgacggtgggaatgcctcaccgaggctgccgcccccatgctgacgaatgtgtggggtgaattccaggggaaggaggccagcgagcagcgcatcagggagctgtgtggggggatgatcagcggtaagtcagccacgtgcaccggctgcagcggggcccatccccgcctgggggtcccgtgcctggggctacacagaaagccttcgtgccactgctttccagccaaagtgagcccctagcactcaccccgcctgttagcccttgggggtccacgtccgccttggcgtctgcctgtcctctgcgctagaggatggcccacgctcccgccccggattcaaccagattcccagcacgcagcagacgccctaaagcctgctgaatgcaatgggtacaagaacagcggagtgtgcccctgtggctggcagggcaggtccctaaacacccccaagggcacttccttcaccttcccactcaggcttctcaggctccaaggggttgggggtcctttctagctccagcattcatcaccccaaagcagttaaaccattttccatcaatcagaaggaaaacttgcttctggaagacagcaccgtgtagatattttatgctttacgtaacaatacttctgatgatcctctctcgagtaaacgcctgcacccttgttttcccaaagaacaaattgcacagttagccgcgcacctaaggaagcctttggcacccgggtccattggtcggcccggtccagctggcccccctgggcccccaggacccccaggctccattggtcaccctggcgctcgaggaccccctggataccgcggtcccactggggagctgggagaccccgggcccagaggtgagtgtttgaccccatgacacggtcaccctgctgtaaaaatccctgagactgacttgttagtaggcgctgcttctggtgcctgccatgcgccctcaggggtaacccctggaacgtgggggcctctcatgttttggggcctagcgcagttaactccttggtaatcctgtgggaactggaacatttttaacatgtgatgtttttctcaaataccattagaacaatatttggcagggagggattgatttaaaatgtgacgaaggctgggcgcggtggctcacgcctgtaatcccaacactttggggggctgaggtgggcagatcacgaggtcgggagttcaagaccagcctgaccaacatggtgaaaccctgtctctactaaaaatacaaaaattagctgggcatggtggcacacgcctgtaatcccagctactcaggaggctgaggcaggagaatctcttgaaccctgaaggcagaggttgcagcgagctgagatcgcaccattgcactccagcttgggcgacagagcgagactccgtctccataaaagaaaaaaaaaatgtgaggaatggccgggtgcggtggctcatgcctgtaatcccagcacgttgggaggacgaggcaggtggattactggaagtcaggagttcaagaccagcctggtcaacatggtgaaaccccgcctctactaaaaatacaaaattagccaggcaaaacacagatgtaagatttgaatgacgcaattagagggatgtgaaaatgcccttaggtgaaccatgggtggaaaatcatttaaaacatgattacaaaatattaataaatactcaactgcttaataggcataaatattttgaacaaaactaaaatcccatttaaattggctgccagaggtcagggaggtggttcagccgtgcacggctcagcagcaggcataggttctgacggctgtgccactgggcggtttcactgtggaacatctgagttcacttacgcaagcccggcctcctgcacccctgggccgtgtgccagagcctggggtttatggctgcagacctgcacagcctgttactgggctgggtcttgtgggcggttctaacctggtggtgggtatctgtgttaaatacatccaaacacgggaaaggaatggtaaaaattgggtatgataatcttaagggaccactgtcacctatgcggtgcgtcgtccacctgcagccgtcctgcagtctaagactgtgtacaggtgggtccctctcgtcggaccccgtcaagccctacgcgtgtgacatctgtacttttctaaatgtttccacttcagtgaaaagctggcaccctgtttgttacaaaggttgatcagacaccgctgtggtgtggctgcaacagatactctaaccatatgtctgtgtccacacctcgtgacaggaaaccagggtgacagaggagacaaaggcgcggcaggagcagggctggacgggcctgaaggagaccaggggccccaaggtacgagtccacggccagcaaggcttcactgggtgacatctcttccgccatcttgtagctttatgtggggcgtgcttgggttatgaatgggtctcttttcctcttctcttggcaaagcagtcttagagacaagattaggaattgtctcaataaccactttaatacataaaagtttaatcggggctgggcgcggtggcttacacctgtaatcccagcactttgggaggctgaggcagacggataacctgaggtcagcagtttgagaccagcctggccaacacagtgaaaccccatctgtattaaaaatacaaaaatgagccgggcgtggtggcgggcgcctgtaatcccagatacttgggaggctgagacaagagaatcgcttgaacccgggaggcggaggttgcaggttgcagtgagccaagatggcgccactgccttccagcctggcgacagagcgagactccatctcaaaaaaaaaaaagtttaatcagtaagcagatcctcctggatctattttagctaagtcaatttggttagattctgtttaagctactcagtatctatttcagttaaagtataacagaattttctcttaattgacctgtgcatacgttgaatatttccatttctaatgtcaaaaataaatgctttgtcacggagggaggcagcgccaggatccttggcaaaggccatcccctgcccgcccctgtcttagcctggtgccttctcaaaaccaggaggccttagactccaaggatgtgtgtgtccagatgagaaggatcccgaacagtcttcgagaaggcacccgctcccacctctgcctgggtgccctggagccttctcctctcctctcctccacgcactcacactgctctctggatgccctggagccctctcctctcctccacccaccccacctctccctgggtgccctggagccctctcctctcctccacccaccccacctctccctgggtgccctggagccctctcctctcctccacccaccccacctctccctgggtgccctggagccctgtcctcccctccatgcacgcacgctgctctctgggtgccctggagccctctccccttctcccctccacgcacacacactgctctctgggtgccccatgctcctggactctcctttgctgacctagctctgcctctacctggtgtccaaacgcacaggggtcccaggccccagccacgtctctccgcctgtggctctgaacagcatctgtgttgcacttgctggtggacagcagcctcccggccgcaccatgcccgcaccatgcccacaccatgcccgcaccattctggactttgtcacctcatctcagtgaagggctctgacaccccccacttaggcggctgactccctcttccctcacacccaggcctcccatgtttccactgtcatcactcaccaaagccaccccacaaccccccactccgggccccctgctcactccaaatccactccttactcacacagcccccaccaaacccgcgtaagtcagagtgcgggtgtcctcaggacggctctgcacccctgcctggggctggccgcgcctggccttccccggacactcccgaccgccagccccgcggagagcctttgtgtgccgttccctcggcctccccacccgctgtggcctctccccaagtgaagagtgagcagatggaagagcagggcttgcccacagctggatgtcaagtccccctgctttcagtccgggctgcagctgaactcacctttctgctctgtcccaaggaccccaaggcgtgcccggcaccagcaaggacggccaggacggtgctcccggcgagcctgggcctcccggagatcctgggcttccaggtgccattggggcccaggggacaccggggatctgcgacacctcagcctgccaaggagccgtgttaggaggggtcggggagaaatcaggctctcgaagctcataaaattcaacgtgaggaagcaagtgacaaggacgcccgaagcacagtggacggtcatgaaggagcgggggtgtggcaggcgggtgacgtccaggagagggagcgcccctggctgcccctcggccgccgactggacgcgcgggccttgccagcgagcaccctcatcgggctgtcgcctgacagcatacctcaaaaggccctagctaataaacctgtaagcccagcatttgagagaaggtagggtgtgtatatataaaaggttgtgtacaactccacgaggtgaaaaatattcagtaacttgtttacatagcatttgtgtaaagactatgatctcatcccaataaaatgatatattaaaccttcagattaatgactggctacagagtaacaaaaaataaagaatttaatgtacagtaaattctctcccata

SEQ ID NO: 329 - DNA, 471038 bp, Homo sapiens
ggccgcgctttacaggggccgcgctttacaggggccgcgctttacaggggccgcgctttacaggggccgcgctttacaggggccgcgctttacaggggccgcgctttacaggggccgcgctttacaggggccgcgccggcgggggcgggatcgcgcgcaaggcggggctgtagccgccccgggaccgccctgctcaggcgccgtggggttcggcgcggctacgtgcagaatccgtctagctaaaatgtaatttcagattggacaagtactgtaagtgaccctcctctcagtcccacgtgggcgctgggggcttttgctggtgcgcaggctcttagcgcgcacgcccagaaagaggcttctccaacccggcccggcccttccttcccctttcccgcagtcgttgcctcctcctcccctgcctcctcctccccttcctcctcctggccgcttagtctcacacccgccgggccgttgttcccgagacgttgttgagtcccctgtgtcctcttctgggtgaggcgtccggccacttaagggaagggaagggaagggtcggccttgactgcatccccaaggctgcctattaggtgtctggaacccgtgctgcttcctctccgatcagtgcccacttatctgtattcagtactctttctctcctccccttacccttgtaggacattttcctggcatttgaggagcctttaattcacgtctggctaccgaaggcatttttaggctagtgttgcttgtagatttaaacgcttccagcacttgtgataatgtttgaggcacagctgagtttagatgagataatgctgtttggttacagttatcctgagtagaaaggcctagggatatcttttcatttttagccgtttcctttttatttaaagattgacaaggggccgggcgcggtggctcacgcctgtaatcccagcactttgggaggccaaggcgggtggatcacgaggtcaggagatcgagaccatccaggctaacacggtgaaacccccgtctctactaaaaatacaaaaaattagccgggcgtggtggcgggcgcctgcagtcccagcttctcgggaggctgaggcaggagaatagcgtgaacccaggaggcggagcttgcagtgagctgagatcgtgccactgcactccagcctgggggacagagcgtctcagaaaaaaaaaaaaaaaattgacaaggtgcaaaatggtgaatttccctcatcatgggctgttttccactaaagcacttctgtgtcttaacacaaatttcttccccgaagagtcagtcatgacatgaccaaagtctgaaaagcagttaatccttaggttaaattttaaagtatgagaccaggaggggtgaggtgcttattcttttgacttgtaaatcagaatgaaagaagggaaagtcttttattttgtggctgttatttaaatggtagagttttgctttgtatagtttttgcttgcttttcctcttttttttctatgatccaccacgtgtatgtcctgatttttttcctttttaacttgcttgctggattttccagccagatgactgccgcttggtcttctgggagtctcctgttaatggggccctcatgcttggctcttgacctgatggccactggcctggctcttggaggacctcctagtgggaggcccagagcactgttattaaggatgattgggggaacagatcagagggggtcagctgggcctggagatcaattttgagggggagggaggttgggagcctgcctggctggatttggaagtcaaaacatgtgtgctgggagaagggcataaccccagagggtggagagccatgtctttctggataaaattaataagtttactgggaggaggctgggccttccaggctgtgttagtttttgttgtgggccttggcttttcctggaatttggttccctttccctaacctttcacttattagtttaaatagttccctttacctaacctttcacttattgatttaaatagtttaaatcacagtcaattaccagctggtttttaaaataatttgaggtaatgaatcttgcccttaatctcctagccagagtggaaccccctacctccacccccagggggatttgaaatgattattttaccagaacgtgctacagagatcacttaccttctcacccgcccacctttttataatggagggacatagaatcaacccaggtggtgtcagagatcatccaaatcagttcttcatgtattcatttgttcactcatcttgtccacatactttgggcccagaactgtggtagtctctgggaaagtgcagatgagtaagacttggtctctgctttcaagctttcatccagtttgcttcaatccactttgatgagggagattatgtgatagtgagatgagtacattgaaaaggtatgccgaagactcccaggagttgagagaagggcaaatggctcaacatggggaagccatttggggaggacttcccagaagggaatactggagccgagttccaaagcctaagtatgagtgggctggagaaagagcgagggattatatgaaccgggaacagcatgtgcagaactacacaagcatggcacatggttgattaggatggctgtgcaggaaaggataagttggaaaaaatcacctgacaggaggctggggagggtgaaggccaggtcaggaagggtctggtgaatcatcttaggggagtttgaaatatatctccagggcaaacagtgatacatactctcaggtttatgttatagaaaattaattctggctgcagtttggagaatgaattggattggcgaagcccggagagaggtaattgtagtaatataggtgagagacgtgttagggtaatagttatgggagtggagagagattaggaaaatagaatggttaggaatgttataaaggttcagtgccacaaaagaaatagcacttgaatatcaaattttcttttttcttctcagcaaggccatttacttctatagaagggtgcgccctcacagatggagcaatggtgagcgcacacctggacaagggtgggggggcgggtcttatgcctgacgcacgtggcccctgttgctgtgtcgttcccctattggctagggttagactgcacaggctaaactaattccaattggctaatttaaagagagtgacgatgtgagtggtttggcgggaaaaatggttatggcagagcaggaaatcggaatgagtcagggtggagaatgagcaggtaatcggaatgagtcagtgagtctgggtggagcaggtgatcgaaaaagcttgctttatgaggacgttaaatttaaaagtagaaaagaattgaacatactgacatattgattctttgaagagaaatttagagctcatatctaatggaaattaattactgactgaatgtagggataagaaggaatgtagtcatcagtaggtgttcttgagtgggctattttgtagcagctttagtgaggaataactgacatccagtaaactacgtattgagagtgtctaattggagaagttttgttatatgcatatatctatgaaaaccatcatgaccatcaaaagaacatacctaataaccccaaagattgcttgtgccctttttaattcctctttgtataccccctaaggtaaagtatgtattcaatctttcgtccattttaaaaaatgagccttttattttctttttattgagctttgagaattctttattcttatcataagttctttatcacgtgtaacttgcagatattttcttattttgatgcttgtctcaacagtgtcttttgaaagcagagttcttaattttgatgaagtctaatttataatttggttaaataaatgttaccaatctgaattataatggatcatgctttttgtgttttatctaagatatctttgcttaacctaaggtctcaaatattcttcctatttttaaaagaagttttgtcatttttggttttatattaaatctgtgatcattttaaggtaatttttgtataggacatgaaatatggaatcaagttttttttttgcatatggctatccagttccagcactgtttgctgaaaagcctatcttcattgaattgcctttgcacctttgttcaaaaatcaatttaccatgtatacattggcccaattttgtgttttattttgttcagttgatctcttgtctattttaatgcgaacaccacatagtcttataaatacagctttgtaataagtactgaaatcaggtagtataagtcctttaattttgttctttttaaaatttgttttgattattctaggttctatttccatatgaattttataatcactttgtccatttcaaaataaggcctatttagattttaactggaattgtattgaatgtatacattaatttggggggagaattgacatttgaaataccaagtcttctgacccgtggacacagtatatctgttcatttatttaagtcttccttatttctctaggcaatgttttgtagctctcaatatgtaggtcttacacatctttgttggattatctgtaggtatttcctattttttgatgatattgtaaatgatattaaaattttatgtattttaaaaatttattttccagttgttttcttgttactggtatattgattgtgtatcctgaaatcttgctcatgtgcttattatttctaagagcatttttgtagatgccatcagattttctatttaggtgatcctgtcatctgtaaataaagatagttttacttcctttccgatgagattgccttttatttttcttgctgtattccactagccagaaccattgctttgcatagaactgatgagagctgacatcttgccttcttcctgatctgagggagatgcattcattttttcattattaagtatgatgcatgatgctagttgtatatcttttgtagatatgctttattaggtttaggaagtttcattgtattcctactttactgagaatttttttaaaggaataatggaagttgtaattttgttgtttttcctataactgttgtgatcattcttttttttttttttttttttttttgagatggagtttcgctcttgttgcccaggctggagtgaagtggcgtgatctcggctcactgcaacctccacctcccaggttcaagcgattctcctgcctcagcttcccgagcagctgggattacaggcacgcaccaccacacccagctgattttgtatttttctttctttcttttttttttttttaagtagagatggggtttctccatgttggtcaggctggtcttgatctcctgaccttaggtgatctgccctccttggcctcccaaagtgttgggattacaggcgtgagccactgcgcccagctgatcatttatatttttaaaaaagattcttaatgtggtgaattacatttattggtttttttttccaatgttaaatcttgtgttcctgagataaaccctattggtcagggcatattatcctttttttatattgctgaattttattagctgaagtttgaagaatttttgtatccatccttatgatggatattgatctatagttttcttgtatcagctaaatacctgacctctcggtaaatctggcctcgtagaatgaattaggaagtatttcttccattttgattttttctggaagagattatgtagaattggtatttttgtttcttaaatgttattgcagcactattcacaatagcaaagacatggaatcagtctaaatgccggtcaatggtagattggataaagaaaatgtggtacatatgcaccatggaatactatgcagccataaaaaagaacatgatcatgtcctttacagcagcatggatggagcaagctggagaacattatcctgagccagctaacacagaaacagaaaaccaaaaatactgcatgttctcacttataagtgagagctaaacaatgagaacaaatggacacaaagaggggaacaacagacactgagatctacttgagggttagatctacttgagggggtaggaggaaagaggattagaaaaaaaaataatttattaatataaaaaatgcaaacctaaagtatttaaataaaattgaactttattcagtttgttgaaagtttaattgaatcttattaaataagttttaaaaaataaagccattcacaattccaaaaaaaaccccaaaaaaccctgtttagtaggattcactagtgaagccatcagggcctggagttgttgttttgggggcaggaggttaaatacaaagtcgtttgattacatagatataggattgttcaggttatctatttcctttttcccccagctttattgaggtatgactgatgagtaaaaattgtacatgctcaaggtgtgcaacgcaatttgatatacattgtgaaatgattaccacaatcaagctaattatatccatcacctcatgtactctttcttggtgtggtgagaacacttaagatttactctcttagcacattttaagtatacagtaaattatcaactgtaatcactatgttgtacattagatctccagaatttttctaataactgaaagtttgtattctttggccaacatttccccatttcctcaatccctggtaaccaccattctcctctctgctttaatgagttggacttttttagattcttcatataaggaatatcatgcagtgtttgtctttctgtttttggcttatttcaataggatgttgtactcttaagttcatccgtattgtggcaaatggcaggaatctttaagactgaataatattccattgtgtatatatgtatgacattttcattatccattcacccatctgtggacattaaggttgttttcatatcttagttattgtgagtaatgctgcaatgaacatgggagtacagctattacaccaagtagtgatttcatttcttttggatatatatccagaagtaagattactatatcatatggtagttctatttttattattttgaggaacttctgtactgtttgccataatgctgtaccaatttacattcctaccaacagtgtacaatggttcccttttctccatattctcatcaatacttattctttgacttttgataatagctatcctaataggtatgaagtgatttctcattgtgcttttgatttacactttgctgatgattagtcatgggtgagcacgttttcatatacctattaggcatttgtatgtcatctttgggaaaatgtctattcgagttctttgcccattaaaaaaaattaagttacttgagttgtatacatttttaaaaatatattttggattttaagcccttattgggatatatgatttgtaaatattttctcttttagaggttgctttttcattttctcgattgtttcctttgctgtgcagaaactttgatgtagcctcacttgtttatttttgcttttattgctcatgcttttgatgtcatatccaaaaaatcatagccaagaccaatgtcgaggagttttttgtcgttttcttctaggagttttaatgttgcaggtcttatgtttacaactgtaatccattttgagttgatttttgtgtatagtataagggttcaatttcattctttcgcatgtgactatccagtttttccaacaccatttattcaagagacttccttttccccattgtgtttttgttgcttttgtcaaagggtagttgattgtatatgagtagtttatttctgggttttctattggttccattagtgtatatgtctctttttattccagcaccatattgttatgattattatagctttgtaatataatttgaaattgggaagtgtgatgtctccagctttgttctttcccaagattgctttagctatttggagttttttgtggttccatatgaattttaggattgtttttctctattttttttttaaatgccattggtattttgatagaaattactttgaatctgcagatcactttgagtagtatggttattttagcaatattatttctaccagtctgtgaacatggatatgtttccatttatttgtgtcttcttcagtttctttcatcataggtttatagttttcaatatacaaatctttcacctccttggtaaattttttcctaagtactttttcctttttgatgcccttctaagtgagattgttaatttctttttggggtagttcattgttagtgaatagaaatgcggctgctttttgttatgttgattttttattctacagctttattgatttaatttattagttctaacagttttttggagtctttgggtggttttctatatataatatcatgtcatctgtaaacagacaatgttatcccttcctttccaatctggatgcctttcatttagttttcttttgtaattgctctagctaggacttccaatactgtgctgaatagtagtggtaagagtgggcattctctcttgttcctgatcttaaaggaaaagctttcggctttttgatgttgagtatcatattggctttgggcttgtcatatatagtctgtataatgttgaggtggattccttctatatctaatttgtgatagtttttattgtgaaagtatgttgaattttgtcaaatgcttttgcagaatctattgagatgatagtatttttatcctttgttctgtgaatgtagtgtatcacatttattgatttgcatatgttgaaccatccttgcattacaaggatagttacttacttgatcatggtgaatgatcttcttaatgtgctgttgaatttggtttgctagtattttattggggatttttgcatctgtgttcattgtggatattggcctgtaattatcttttctcataatgtccttgtctagctttagtttaagggtaatggtaatgctggcctcataaaatgagtgtggaagtattccttcctctttaattttttataagagttcaagaagaattttattaattgtttaaatgcttggtagaatttatactctacccaattccctctgagttatgaggctttctactctggctgttatgaatagaactattcctggccttatgtgaagcccactgatttgttctctctaatcctttttggtgcttctgcctcagattgttttcacatatagatgcattagtacggatgattagtactctcctgaatacttggggagtacctttgcaattctctggcattcttcttctgtgcagctctctcctctcttgcccaagattctagcctttttgttctccacagactttcagctctgtctcctcaactcagggagactgctgggcttggcctgtgttcatcctttttgtgccacaatctgcagacatatcccagggattaaacttgagccattgaaggacttatctcattttttcccatctctgtgtgattactctgttgcctgatgtccaatgtcatgagaatctttgttttctatttttttccccattgttttaagcagggaggtaaatatggttcctgtcactacatcttggctggaattggaagcattcaactagaatttttgaggaaaatataaataagggactatctaaagatgtgaggaggggatttttgaggtactcagataccaataataaaggggaacttttaccacttcaaggtgctaagagcatggtgaaggaagtatatcagagggaaaaacataagctataactaaattaggataattttcaataaaagaactattgagtaagtgagggcagcctgaatgcctgggtctagtaacagtaagactgttacatccttagacccaaaggggtgagggaaggactggttaccagaacccaaaaggagaaatcgtgtggagaagcctgcctggagaggatctgttattttagcccaagagaagcagctggcccaggccaactctacaggaaaagaggcctgaccttactcttctccttcctttgaggcttcagctagagctctccattgctcaaacccaactagaagacagaggattagagagtcttggagatccagattattgtccccaggacagatagcagggagggaaggtagagaatggatatgtagttggggaagaatatacagtgacatatgtatagagtgcacttaggaaggataggaaaatcaaataaaaattgttcaggctaaatatattaccagtcccttaaccatctagatttggggctgagctacactgaaatccattgcagattatgctgagagctgaatagcttggattctgctaaacaggctatgggagagagattaagaaaggactcggttgctgactggatattgcaagatgaaaattgagaagaagacaaagtctataaaatgaagaatgaggccaagcacggtggctcatgtctgtaatctcagaactttgggaggccgaggtgggaggatagcttgagcccaggaattcgagaccagcctggccaacatggcaaaacaccatctctataaaaaatctaaaattattgtgtcatgatggtgcatgcctgtagtcccagctactcgtgaggctgttatgggagaatggcttgagcccaggaggtcgaggccacaatgagctataattgcatcactacactccagcctgggtgatagagtgagaccctgtctcaaaaaaaaaaaaaaaaaaaaaaaaatcgagtgatttagacagatcaaactcaatctagttaaccaaatattgggattgtagaattatgtggcagctttgacatttgaataaggctattgttaggatctttaaaaaattgtcatgtgacatagtagaaagaacataggattgaaatccttctctgttattcactgactctatgaccctgacaggtgacctaactgctcagaaccttggtttcccatctaaaagttgcagaaaagattagcaaggccatctggtaagtcactggcaccacatcttgcacagagtaaatgttcataagaaatttattgatgtaagatgagggttggctcaaaatataagtaagtctaaaaagcatttggattcatgtgaagctacatattgataaaacacagataacactaattctagtgaacccttaagggaagaatagtgtatttgacaaggattacctcaaaattcccctcaaagacagtttgtgaagaagccccagctccctttcccttctcccttaaaaagcagattattttttatgttagttagaacaaactatagatagtttgttcctatcaagaacaacttatccttgtcagagattggatgctgggctggatgggccagtgatgtgtcccagcatgtgttgcatccagggggtctccaggaagggagagggaaaaggaagacttcctgtgtgcttaccgtgtgcagctagcccagcttacctcatctccatgcagtgtcatgtagaaacatgggtgactgaagatcattctagttaagtatggtcagtgcctcttaatgctgctgcttctctttttattttagaaaaccatgtcatggaggaaaattacaggaacttaaaatgtatagcatggagaaaagaagacccaacaggaggtcatgagagtcatcttaaaacatttgaaagggtagcccatgtataagggtaaaaaaggctgtttggatgatcctttgggataaaaattaggactagagggtaggagctatactaagcacagttcaactcaatacagagaaggtcttccttcctattactgtaatagctgctcattgagaacattcagacagcacagagagggacaggtaaatggcctccaaacctccactatatttctttttgctggatgtcattgcagtaagcaggttttgtgtgtgtttcctgaaatcttttatgataggtctttatacaatacagtggttctcaaactctagcatccatcggaatcacctggaggcctttttaaagcacagactgctgaaccccaccccagtgtttctgagtcactggagctggaagggggcctgactttgaatttctaccaagttccctggtgatactaatgctgctgctcttctagagaccacgaatggccctgttaaaatttgagaaaataaaagtttgagaaccactgtattgcatgaagaaaatagagcttttgctctattctttattaaaaaataatacaaatggcatcatactgtatcatccaagaacttgcttttttagttaataatatataattagcagctttctttttttctcattcaacagctactgatgtatcaattttagaagtcccctattaataatcatttaatttgcttctagagtgtttgtggatatgttcttgcctttacaaaaaaaggttgtggtggattttttttgtatctttttgatgagtcagtgcataaattcttagaagataaattcttagaagttaaactgttgggtaaaagacttgattttaaaaatggatagatagtactaaattattctatcaaagatagaatcacttttctatgaaaagtgtatgaaacagcctgtttcccacacttttgccaagtgggtattatcaaaattttccagttcctgtttgttaggtgtaaaattatatcttagtgttgttttgatttatattcctacactatttgtcagttgaaagattcctatgtatttatttttctatgaactataagtttgtattctttgcattacaggtagagggaacagtatgaacaaaagcaccaagccttcctttgaatagtttctagtagttttgtagcattgaagtacgaaggttgaggttagggagagaggcagggagctaaggttagaaagtcaggcaggggcctgagcttagaggtccttttgggtcaaataaagatattgggctttattttgggcagaagaagcattggtgctgtttaagcttgtactttggttcgtggtacttttgacagagccatgtttgtggaatggtcaagtctaatgtttaatcttcaaataattcattctttagtcctttcaccttcggccttaaagctaccagaccagggccaagcgtggtggctcttgcctgtaatcccagcactttgggaggccaaggtgggcagatcacttaaggccaggaattcgagaccattctgagcaacatggcaaaaccctgtctctactaaaaatacaaaaacaaattagctgggtgtggtggtgtgtgcctctaatcccagctacttgggagtctgaggcaagagaattgcttgaaacccaagaggcagaggctgcggtgagtggagattgcactactgcactccagcatgggtgacagagtgaggaaaaaaaaaaaaaaaagctaccagaccaggcttcataaactggtaaacataagaatgggccaaagacttcaacccatctgtgacttggcattgtctctgaggggggaaattttgcatgatcgcatggagaatggattttgttgctttatctgatattgtcctcagctcctcctgaatttgccgagatcttacagcagtcagtaaggttggtgagttctttcgttgttttaatttgagtgactttctgggaaaaactgtggatttcggccaatatgctgatgataatagcattgctttgaaggtcttgttctgtagaaaatcatttcatagttaattatgtcagcaaatcaacagcaacctcttgaagaagaaagcagtgaggggagaaactgtgtatatgtttaaattattcagaactcaaagagaggtcaggaattcacatttcaaaaggaggagtctatgtaagaacaaatcattaaatttgcatatcttttccccattatgggcctagttttgtaattggcatattagggattaaaatgaaataaccctgcatttagaattaggaaatgactccccctgtcccccgactatctccctttctgtctccagggtcctggcacaggagtaagaaactatcacatttaaatgtctgcatttagagaactcagggtgtccgttgggtttgtagaagatggactgactctgttgattcacttgtcgggtggaccctttctccatcgtccttctctcctcagtgtgtgttcctatttaaatggagccccctgcttgggagggagactgctccaaagaggagcatggtgcttcagccacaagccacatagaaggcttgctcataatgctgctagaactctgcagaggaagaaagttttttagggtctttttattttaagagatatttgactattttatatattaataatcctctcctccttcacaacccagtaattccccttattactacattacaatacattgtgctcatacaaggaaggtagggagcagagcattttcagttaatatctaatgtttcccacagtaggatttatcgtgacatcaggtagtctgtattaactggatcatggagaaggcatttctaatgatcatctgaaaaggcttcacaggattaacagatttgaaacttcattctctgtgtgcccaggacacaggcagcttggttagtgtggaaagccaagtcatttcagggatggtagaaagagttcagctctggctgataacaaacctgaaattttttttttttttaaagattcttttttttcaatattttactgtaagttccaggatacatgtgtagaacctgcaggtttgttacataggtatacgtgtgccatggtgatttactgcacctattgactggtcctctaagttccctcccctcgtccccccaccccacaacaggccctagtgtgtgttgttcccttccctgtgtccatgtgatctcattgttcagctcccacttatgagtgagaacatgcggtgtttggttttctgttcctgtgttagtttgctgaggttgttggcttccagcttcattcatatccctgtgaaggacatgatctcattcctttttatggctgtgtagtattctatggtatatatgtaccacattttctttatccagtctatcattgataagtatttgggttggttctatgactttgctattgtaaacagtgctgcaataaacatatgtgtgcatgtgtctttacagtagagtgatttatattcctttgggtatatacccagtaatgggattgctgggtcaagtggtatttctggttctagatccttgaggaatcgccatactgccttctactcttccacaatggttgaactaatttgcattcccactaacagtgtaaaagcattcctgtttctacatagccttgccagcatctattgtttcttgactttttaataatcgccattctgactggcatgagatagtatctcgttttggttttgatttgcatttctctaatgatcagtgatgttgagctttttaaaatatatttgttggctgcgtaaatggtcttcttttgagaagtgtctgcttatatcctttgcccactttttgatggggttgtttctttttgtcttgcaaatttgtttaagttccttgtaaattctggatattagttctttgtcagatgggtagattgcaaaaattttctcccgttctgtaagttgcctgttcactctgctgatagtttcttttgctctgcagaaactctttagtttaattagttcccatctgtcaattttggcatttttttgcaattgcttctggcaaacctgaactttaatatggctttgtccctctaagggctttgtgactatcaacaggatattgactctttcaacatttcagtttcctcatgtagatgggagaaacaacatatactttggtaggtgttataaatgtggattctcctctccttttctctgtaaagggaatggcttggtaggtcaacagaagaaggcattataaacaagtaaatgtgctttattggaacacaagggttgaacagaacccttgggagggtgtaagcagggttttatggaagatggtatgggagatctgaagtttaatttctttaaggggatgtttgttggtggagtttggggatgtcatttgatgagtcagattttttcatccatgatatctttaggacctgttctgtgcatttggcttcagccaagtttgggttttatgtttcccttgtgactgctgttggacattacctgtgtggctcttggaaggttatggtttttggccaccattcaagatggttcaccatccaaaactggctcagtttggattcttgtggctgccacattgtgaggcacacatggggatttggtaggttctgtcttttctgccttttggaatccaactttaaatttaaaaggatagccaacttttctactgtctttctgatttaataccatgtccctcttccaatcatctgttagtctttacaaatgggctcagtaaagagcataaggatccccaaaaccctgaaaaatactgagtttctgacctagttggtcagaactgttggaacagtaatgagagcagtaaactggtacctccattaactgctgacttgttgctgtgtcctcacatggtagaaggggcaagagtcttccttgggcctcttttatgaggatactaatcccgttcatgaggactcctttttcatgacctcatcatctcccaaaggtcccactttttaataccatcaccttaggggttaggtttcaacacatacatttttggaggacacaagcattcagaccataacattagactgtcagtttgttaaaattagagataatgtatttttcagccccttattcctagcatcctggcatagtgaaagcacttaatatttgtttgtttactggaaatcaagctgttagatatggcgagaatgcctaggtatagataacacatattaaaagatgtgggtgtcagcaattgcaaaaatgtgaaaacaacctaaatgcccatcaatcaataagtgggtaaagaaactgtgatatatgtatcacacacacacacacgcacgcacacacacacacacatgatggaatactactcagccataaaaaggaatgaattaatggcattctcagcaacctggatgggactggagactattattctaagtgaagtaactcaggaatggaaaaccaaacattgtatgttctcactcataagtgggagctaagctatgaggatgcaaaggcataagaatgacacaatggacattggggactcagtgggaaagagcgggaagggagtgagggatataagactgcaaacaaagttcattgtatactgcttgggtgatgggtatatccagatctcacatatcaccactcaagaacttactcatgtaaccgaacaccacctgttccccaaaaacctacggaaattttttttttctttttttttttgagacagaatctcgctttgttgtgttgcccaggctagagtgcggtagcgcaatctcgctcactgcaagctctgcctcccaggttcacgccattctcctgtctcagcctcccgagtagctgggactatcggtgcctgccaccacactcggctaattttttgtatttttagtagagacggggtttcaccgtgttagccaggatggtctcgatctcctgaccttgtgatccgcccgtcttggcctcccaaagtgctgggattacaggcgtgagccaccgcacctggcctaataaaaaaatttttttaaaagatgtgggtttcaagaggtgattcagtgttggaggtgaaggttgatttgaggcccacactttgagtaagaaggctgtagagtgtctttggtgatgctatactgttacacccaaattttccttctgtgcctcccagtgccattgattctttctggttataaaggaattgcccttttaaagggctctctgtgctcattatttcctttaatcttcacaacaatcccttggagtagttgtatagaattcatgagtctcatacctgtgaagagagacatcagtgaagagacttaccccaagtgagtcagtggtagacacagatgggacaagcatctggtttcctattctgaatagaatatggtgaccctgatattgatttattttttagtgttgtggagaagaattgtcttcatttctcccaaatgcagtgactatttgttagtccattcttcagctccttattgagtacctactgcataccaaatttatttgtgtgtgtatgcactggggatacagaggtggataagatagacgcagcttatgtcttcagttgtcaagacacagtcctgcattgcttagcaggatgacttctgcactccgtcttggagcttcttttgagaacttctgggctcagagactatgtgtgtgatgttgttttctcatgttctatggtgtctgggatcttcagagcctgttagccagctggctccaggaacctatgtgtcatgggttccacaggtgaacttcttggtactggggctcttgaggtctctccagttggtgacaggaaacattccaggtgtgagtggctgaccctcagagtagagaaagggttttgttggtttgtgttttgtttctttggatttacctctgggtttctgagaactgacattttcataatctgttccttctctgcattatgttaatagacttttctggggcaggaagaatttagtggatgtcatttgttagccaaggtatatgtctgcttttttttttccttctcccctcctcccatcaatcaaaggatttcttagtttcttatctgtgaatcactcaggcttccacttaactgccagttcagtttcctccttgcccatcctcccttctcttttctcctctccttcccccacttctttcccccatttcccttttttccctctccccaccacacttccctttcctttccccctcttttccttttcctcagattcttttgaatttttcttgatctgcaacaagccaggtcctttgttaggcattagtgttagacatcagtgatgcataaaagattgttctgctcttccaggagctagataagggcctggttccacttctcagtattcagggaatggattccctgcttactcccttccttcctttggatgccacaaaatgagcacttgactgaaaatatgcttatacgcgtttttacagactacgccaagccacaggtatgtctagatgaaaaatgtgttgtgccattgctacagactctaaaagtttggggaaccatggaagtgtttgggtttcttttgagccagtcttggcaaccttaaaacttttagaactgtctccccttggagggaaaggcgaaaaagaactgaagaggaggccttaagaaattttcatgtttagaggtaaagttttggttagcaagctggtcttttcttcctatttattgttggtagagcccatagagaaacaactattattgccaaatcagctctttccttctcatttcaaatttttccaccatcttagagcatgtaaaaattgttgaaagtggtattcagtcatttctattaagactgaggtgggcaagcttaactcattgttcatcttttttcttcccaatcttagcaaatccctgattgcagtataactaactaaataaattgcacaggacttgtgtacatcaactcccagcaaagtccaaagatcaaagttgaaagaggatactgaattccttcccagatttctgggacactgcttctgtgcactgtcaccaaataaatcctggaggagtggcgccttaagaaatagggtaagctcatccgcttctgggagattgtcatcataggcagcaatcttaatgctctgagatgcttcagagggaaagaaggggaaaagtataaaagaacaatccccacattatcggtttttagctcagtatttgtagcttgtacccccttcttaggattgctaaaacccgtttgcaaaggacagccctctatttccaggtccccttttccttttttcacactgcatttgagcagtttgcacatttgttgaagaatcagccacaaagtctgtggtttcctgtggcacatttctaacaatatttatacaggctattatttaatgaactgtataaatatttatacagaacagtcttttgatcataaataggggctaaaagtcagtccagtccatgctgaggacttggacaggaggctgtttctgtgctttgaaatgtcttgtagactgagaagttaggtatgtcccaggacttgtacgcagcacagcttgaatttctgttatttttctttctcttggccgtccacagtccgtgccctcatttctttccgcctgaccaccctccccatatccctaacagctgttttctttttagagtatttatctttgcctaagaagaatgaaatgaaaccccagttccgactctcaccattcataatgcggtctttggagtcacactgacttagcctcaaaccccagcccctgtgcttctgtaccatgcaactttaaacagcttcctgtctgagaacctcactttccttagctgggaaatggggctcatactgcctacctcacagggttgctataaggattaaatgaaatcatggagtcacatggtgatctgcagctcagagctcaatagatatttcttgctgcatttgttgttcttattgaagaagtaatcaaagggtttggctttcagttttagctggatgttgtggaaggagccctaaacttgccgcaagagactgtggttcaaatcctgatgccatttgctgtttgtggcactttgggcaaattactccacccttctgaggtataataaagtggtgataggtttaccaaactgattgggtttctgtgaatgagattaacattgtgtgggaataagtgacacgatgatgatccttatccttgtttactttacaaactagaaaaaggaataatgctttccactttacagttactttactttttgaggccaaggggtactggttgcataagattaggagtctaggacgcagcagatcatattcatgacccaggaacaaagggcatagagggggaagagcaggggacctatgatgcagaaagtcctttgctggagctcacaggtcgaatttcagggaagctgcccaagggcttgaacatccctgctttcaggttccaggtatggaaataatcacagagatcagttaaaactataataatgggaaaagtggtgaacctgaaatatgcaagtaggatctatttcatagaaaaacatgaactgggtgatgtgtgtgaatgacgctgggatggtttgactctttgctgcatggtgccctggtaataagttatagaaatccatattttgctagaagcaggccacctggtgttgtggaagggtcagtctctgaagatgaacagcctgggttctgagtcagccaaccttaggcacagcaggcagaggcccccagcagagtccttgacaaatgggcatttagtaaatagaggaatagcaggaggcagtggagcatcctgagaaaggttagggctgatggaaccggagggaatggattactgtcaattgtattactgcctagtaatatggcatactggagcaagttactttacctatctaggacttattttcctcatcagtaaaatgggagtgatcatagttattgtcttcaagaattgtggtcaggcattgtaatcaagctgcttagcagaatatcagatatgtggtaaacatggtacctttttttatttccccagtgatgaattttaaagacatccattcactgagttacaaggacttactgagctcctgctgtatgccaggcactgggcttacagctgtgacacaggcggcagctggaattaactgtaatcataccgctccattctccatgtgaagggtgggctcctgccagaaaccagaactggagcaagcccagggctaactgtagagtggaaatctgcctctttgggttttactggaaaggaatcagaatgtgggtagggtggtaagatgatgtattttatcatattactctcttcatcagagagggagtcaaaagtgaggaacccaagcctgagcacgtgggccagccccatggggaatctgtcttgtcatcggggctggctggagtagagacaagtctggatgctggctggccaggtctgtgtaagccagggtattgaatagatttttcatttcctatttatttctttgtttcttcctaagcgtttatagtagtcttgcaaaagtcttgccaagggcaaagagttgttagcatgctaggatcagtgttaaggagcagcaccccgggggcctttgcagtagagacagtgggaagcccagagaggggattccaagtaaagtaagcagctgtgagaggttggtagagggaaggtagagtggctagcttcaatcttcttcctgtttgcagctaataaaattgaggaaactcagcgaaggcattgcccctattttgtcaatcagtgtatcctcagcaggcttcctggtgttactgtcttctgcatttcttctgagtctcagatgtcactgattgcaagatgcaccattatttattattaccatgaagtaagaaaggaaatgataccaattaattgtaacataccattgattgtaaggttctcactggttttagagaagctaaatatggaaaaatgagtgccgtagaatgaataaaatgtggttgtaaaatgaataaaacaggcatggacctgttcatccttgtttctgttaattcattgattcagttgttcattcagtaaacatttactgaaaacctattatgtgccagacactgtgcaaggagcttgggatacagaaatcaataagttcatttttttcagattcagttaggaagacagacatggaaagaaaaataaaattgtgattccagagtggtaagttttaaaagaaagcagggagaagataccatgttggcatcctttgtatgtatgcaaggggagaaagggaaggaagccttttccaaggagaattgatggctgacctgggtcttaaaatataattcagtggtcaccaggcagacaaggaaaggagagaattaggaagggatgagcaaaggattggggcagcctttagcagctgggggcaattgagagcttatgaggagtttgaggatgtctgtagcctggagtgagaatgagcaggactgtattaggcggggctggatggcaggcagagggagcctgtggagggtgtgagatcccgtgctgaggccctggggtatatcacagctcaaagctggtggttttcagttgtcctgagagagggcctagcagagggactgctggggggaagggctggagggtggggcaagggcgatctttgcttcagagcagctctgtttttatctgttttgttttcttcaaataatggcttgaagaaaaggtatcactgttgaatgaatgaaggaatgaatgatttgaaaactggtgctaatggtcatatggaggtccccaaggggaatgtaagcaagggagagaagttgaggttacacaccagtggaggtctgatgaagctcctatgaacggagcaaatgttacttctgcagcttctccattttatttttcacctgctcatgagccacagagccaaaagggggacaattctgttgggaaatcattgtgattaagacagaagcaattacttttaatgaagtttttattgttttatttgttttttactggagtaaatatctaggaagcagtaactgaacatctgctggttgattttctttcagaatctccatgtttgacttggctagggaaacattttctttctgaagttgaaggatgcagaaggttgcccaggttgaaattagactctgggtggtaaaactgccttgagctcacctggagagttgtagggcatccacctgctcagttgtgttgggggcttgttcttattctttcaaagccaatctggaaaataaaagcctctatgagattccatgtcatgtgggctaatctgaccaaagggacttagagcagccatgaaggccaaggaattcctgaatgttctctggtcagatttccttgtaactcacaaggggtctgtaaggaaaacagattgtctaactaattgctgatcttgtctcctcggggttccttcccaattcccagtcacttcatgacaaagctgcaatatatttgcctcttctccaaacctatacagaaagcttttaagaaacaaaggaaagagcatgaaacttgggattgcacaaatatgggactttaggtccaggctgcccctgaatgaagctgattaaattccttaacttctcatagacttgcttcttaatcagtgtagtgtgtatcattataataatgtacatttactgtttgaatttatgagtagacctagctagcattaagcaaaaagttacttatctcttggaatctcaccttgaccacctgtaaaacagagatgtaaatagcctcaccttctagagtcatagtgaggagtaaaggggacataagcacttttcacagtgcttgcgtgtaagaggtacttagtaggtaattgttgaatgaatgactgactaggaggacaaggttccttttcagtaccttggcttctgttcttgttgattgaaattcactgagaagaaactcatctccattgcctccagattctaagttctcctaccaccctgtacttgcccttacagcactcatcacaactttgcctaaataattatgtatttaaatcctgactctctctcaagagtggaaatgccatgtctgaggccatatctgtgctgttcacccaccatgtagctcaatgtttattagtatactgttatcactaaaaatgtttgttggatgaataaataacaaatggctaccggttaggtagcggtacctcttttatttctacttttgagatgttttgtgactgtctttgcagatccacttggtcttcatatggtttttacacttgcttactataggtggaggaactgcaatgtctggtggagaacagaaaccagagaggtactatgtgggtgtggacgttggaacaggcagtgtccgtgcagctctggtggaccagagtggggtcctgttggcttttgcagaccagccaattaagaattgggagccccagttcaaccaccatgagcagtcctccgaggacatctgggctgcgtgctgtgttgtcacaaaggtatgggcaaaactggtgttctctccttgttcatattcctacctgctgagtgtcgtgtgtcaatctggtgccgtaaacaatgttggggtaactttagatgcagaggtaagcaagacataggccttgcccttcaggagctcacagtctactggcagagactgataaacagctaatatatggtaagagctgggatcaaagtaactatagctggagctggggaaagagctaaccggagggggctcagggaagacaggacagcttgaggtgtgaccacatgtggaagaattcactgatcaccttattaacatttaccacgcctttaatgtgtgccaaaggctgtgtaaaatgtgttaacttgcactgtgtagttgcatcttcacatgaccctataaaggtaatactgtcactacccctattttattgagggagaaatgtaggcacagaaaagttaggtaacttactcaagttcacacagtaagtagcagaggcaggactagaacaaagcagtctgactccagaggtgcgctcttttttttttttttttttaattaaaaaaagttcaatgggtttttggggaacaggtggtgtttggttacgtaagttctttagtggtgatttctgagattttggtgcactcatcacccaagcagtgtacactgtacccaatgtgtagtcttttattcctcaccaccccccagcgctttcctccgagttcccaaagtccaattgtatcattcctatacctttgcctccgaggtgcactcttaaccattggactctgctgccttccaagtggacaaatgaggatgagaggaactgcattttgggcagagggaatagcatatgcaaaggcatggtggcacgaaaacatggtgtgttctgataaagcaaaggagtcagattagagtgtctcccatatatgccaggcatatgttcaccctgagtggccttggattggatgcagcctgctggcttgggaaggaaagcaatgcttcacaattcttgtttgtttttaaagtttcacttgactgtttgattttatgtcttggtgatcagtaatgacagaggtccttttgtctttttttccatggggaaaaataaagtcctggattccttcttttccctgttcctagtttagttccttaaatattcatgaggtgcttggtaatttgcagatggacaattcaccattctgtccctattgatcagtctgtttaaactttaatgaattctgggctgctgttagtgcccccggagaagaaggcagagagaggagggagtgggtaggcagtaccagagcattatacaggaataaaagagggatgcatcttctcttttgcccatttaattttcctctcctctcccctcctttcagcccccaatctggtaagaatcttctactctttgcacttgggccttctttcttcttttaacatacagccttgcttgccgttaaggaaattatcaagaagaaaatataatcccctgatgaaaagctactttaaaaaaggtctactctaagtacagctggtttaatggtagatttttaatcatctcccagtggtggccaacttatcatctgtttgagccctgttagctgcataagtaccatggacatctgtcgatagcaatgctattgcactatagcaaacctaaatgaagcccttgggtcttaggcgattctcctcagatggagtatggatatgtgggcatgtgccagaagccacaggataagcatgttacatctatatggaacatcattgctggtgtgaggcttagggagggaagcatttttatgttagagagataataacaccataggaatgagagaggtaggtgacctgttatagagcacagattctgcagccagactgcctagattgacatcccacttacaacgtttattaggttgtgatcttggacaagttacctaatgtttcttgcttcagtttccttatctgtaaaatggaaatgacattagtacctacttccataggattgttgtgaggattaaatgaattaatgcacataggatgtcataacattgcctagaaatgtgtatgggttgtttcctatggtggtgctgatggtgacagaaaatgagcagattatagaagatagtgaatttctaagacaaaatactgaaaagtcaaagtctacggcgggggaggcgcttcttgggaatattcattcactctcctggttagggttcttactgtgtaacactttgagaaacactggtctagggcaaagggtggcatcagatatgtcctggtctgtcttttcttcctcatggactccaggaagttgagagcttcagagcagttgttctaattccttttccctaagtcattcacattgcctgagatgactttcctcttagttaaagcaacagtaaggataatgtggtgtcaatgatgatgacaaagacagctaacagttcttgggcacactggtccaggtactatactgaagagcttttacccatcacttcattttatccttataataactacttttttttttttttttttttttttttttgagacggagtctcgctctgtcgcccaggctggagtgcagtggcgggatctcggctcactgcaagctccgcctcccgggttcacgccattctcctgcctcagcctcccaagtagctgggactacaggcgcccgccactacgcccggctaattttttgtatttttagtagagacggggtttcaccgttttagccgggatggtctcgatctcctgacctcgtgatccgcccgcctcggcctcccaaagtgctgggattacaggcgtgagccaccgcgcccggccaataactactttttaaggtagttttgattgttctctctgttttgaagatagaaaaacaatgagctttgaagaggttcagtaagcagcctaaggtctcctgaataagaagaaggggacgctgtccctgccactgctactgctctcatgctctgtcccttgtctctctccagccatatctccctccacatgaccctacctggaactgataagaagtagcctgaaatttttagattttctacacatggggcatcatgaggttacccaggattacgagtgcctttacctggttgcctgctcatctgggaagtgtgtgccccctcagcaggggttatatctagtttatctgtatttctctagaattctttgcttgtagtgtgttcaattaatgtttgttgagtacataaatgaatgatatatctctgttgtttacattgtctggaatactcttctcttaacttcctcacctgcccaactcccaccttataaagtaagcttaggcggggcgtgttggctcacgcctgtaatcccagcactttgggaggccaaggcgggcggatcacgaggtcaggagattgagaccatcctggttaacatggtgaaaccctgtctctactaaaaatacaaaaaaaaaattaaccaggtgtggtggcgggcgcctgtagtcccagctacttgggaggctgaggcaggagaatggcgtgaacctgggaggcggagcttgcagtgagccgagattgcgccattgcactccagcctgggagacagagtgggactccgtgtccaacaacagcaacaacaacaacaacaacaaaaacagtaagcttaaacattcctgtctcctgagtgtcttccttggtgacttctgacagtctatgcccttttttaccaacctcagcagaaagagagggtgagaagcccctctctactgtccagagcccaccatcttcacccagatcactttctactccttatctttgcattttacttgttggcttgtttacccccttttaaactatgagctgagctcttagagagattcatctttatgtctccagtatctaacacattgcctggcacaaattaggtgctcaattaatggctgttgaatgaatgttacttagagctaaaaacaaagagacaaaatccaatctagcattccttatcttgtttcagtgtcactgtggggcaggaaggacaactattcttcctatttgaaatatgaggaaattgaggctctggaactaacaagtattggagacaagaccagaaccctggtgagatggctccaaatcttcctctctgtcttcctccctacattccctaaatttggcaggttttattgggctggtaagccgcacacctaagaggttttatggaaactcacaagtcatagaggttatatgcagtccacgattttaaaggttcctttatggagccacaaatcttaatcattccaaaaaggtgagaacatttcaaattagtgcatgattcatactaaacttctcttaggaagaaggagaagataagctggaggaatcatttagccaacaggtgtttgttgagtatcattctttcatttagtctgcaaacatttattgagcacttaactatgtgctatgctctttgctaagcattggagcatatagaggagacgtatacaagaagtctgctgcttttaaagatgaaacagcttaattgtatgagaaaaataaacaacacatatgaagccagtaaagtaccattttgttctgtcttggtgctatctatatgagtagtggttgtggggagggggacagaagaaagagtagccacatgtcgggttgagcaataatgttaaccttatattcatagaaccattatagtttacagtgcatcttcattttcatttgattgctattgcagggtgaagtagggaagaagttgttattcccatttacatttgaaaaactgagggccagagagttaagtgattttcctaaggtcacccaggtggtatgtgataaggcagaactcagatgggtcaaacctatgcattctctctatctctagcaccatatacctttatattttgcatggaatattattccaagaacctaactgatgtcttgatattcatttttcttttctctattcttgcatttgaagtgttttttttttcctctagtgctaactgatcatgtcactcttttgctacagcccttcaacatctatcactctactacaggcataatgataaattcagttccagaacaccataatgaggtgaatattgcaacaaagctcacatgaatttttgagtttctcagtgcatatgaaagttatgtttacattatattgcagtctattaaatgtgtaatagcattagtctaaaaaaagtatataacttaatttttaaaaattgccaaaaaatgtgttaatgatcatcgaagcctgcagtgagttgtagtctttttcctggtggagggttttaccttgatgttgatagctgcttactaattagggtggtggttgctgaaggttaggtggctgtggtaatttttttaagtaaggcaattttttaagtaaggtttgctgcactgattgactctttctttcacaaaagatttctctgtagcatgcaatgttgtttgatagcatcttatccatggcaggacttctttcaaaactggagttagttctttcagaccttagccttatcagttaagtttatgtactattctaaattgtttgttgtcatttcaacattgttcatatcatctttatcagaagtagattccatctcaagaaatcatttcctttgttcatccataagaagcagcccctcatcggttcatattctatcatgagattacagcaattcaatttcatcttcagggtccacttctaattctagttcgtttggtatttccactacctctgcagtaacttcctccacttaagtcttgagccactcaaagtcattcatgagggttggaattaacctcttccaaattcctgttaatgttgatattttgacctcccatgaatcatgaatgttcttaatggcatctagagtggtaaatcctttccagaatgttttcaatttactttatctagatcaattagaggaatcactatctatggcagctatatccttacaaaatgtaattcttaaataataatacttgaaagctgaaatttctctttgatccatgggctgcagaatggatgttgtgttagcaggtatgagaacaacattcatctccttgtacatcttcatcagaactctttggtgactcggtgcattgtcaatgaggagtaacactttgaaaggaatctcttttctttgagcagtaagtctcaacagcagggttaaaatattcagtaaaccatgctgtaaatagatgtgctgtcatccaggctttgttgttccatttctagagcacaggcagagtagatttagcataattcttaagggccctaggatttttggaatagtaaatgagcattggcttcaacttaagtcaccagctgcatttgcccctaacaagagagccagcttgtcctttgaagctttgaggccaggcattggctttttgtctctagctgtgaaagtcctagatggtatcttcttccaatataaggctgttttgcctaccttaaaaatatgttgtttagtgtagacaccttcattgattgtcttacccaaatcatctgtataacttgctggagtttctacatcagcacttgctgcttcaccttgtgtttttatattatggaaatggcttgtttacttaaacctcctgaaccaacttctggtagcttcaaacttttcattctgtagcttcctcacctgtctcagcctttacagaattgaagagttaggactgtgctctggattaagctttgacttaaagaatgttgtggctggtttgatcttctatctagaccactcaaattttctccatatcagcaataagactgtttcactttcttattcaggtgttcactggagtagcgcttttagttttccttacgaactttcttttgcattcacagcttgactatttggtgcaagaggcctatctttttgccagtcttggctttccctatgcctacttgactaagcttaatcatttctagctttacatttaaagtgagagactatgactccttctttcacttgaacatttggagaccattgtagggttattaattggcctaatttcaaagttgtgtctcgggggtagggatccctaaggagagggagagagatgaggaatagctagtctgtggagcagtgagaacacacaccacatttatctattaagtttgcccgtcttatatgggtgcagtttgtggtgccccaaaacaaatgcaatagtaacatcaaatattatcatagcagatataatattaatgaaagtttgaaatattattaagaattaccagaatgtgacacagacatgaggtgacatgagctattggaaaaatgacactgatagacttgctctttgcagagctgctacacaccttcaatttgtaaaaaacacaatctgcaagatgcggtaaagcaaagcacaatgataccagatatgcctgaggcatacctcaaactgcggttttagttccagaccactgccacaaagcaaatatctcaataaagcaagtcacatgaattttttgattccccagcatacataaatgttttgtttgtgctgtaccgtagtctattaagtgtgcaatagcactgtatctaaaaaaaaggtaccttaattaaaaaatactttattgctaaaaatgctaatgaagtgagcacatgctgttggaaaaatggcagcaatggacttgcttactgcagggttgccacagacgttcaatttgtaaaaaatgtaatatctgcaaagtgcaataaagtgaagcacgataaaatgaggtatgcctgtatttgggtagaactcaatccttaacatggccttcagggccctacatggcctgtctcgacttgcattcctggctcatctcatgatgcttctcctggctctctgcattccagccacaccttccttctgtcatgtcctcaaacatgcaatgctccctttagcgtaagaattgttacccagattctttcttctggctgcatatccttcctaccttccaccagcatatctaactcctgttcatccttagacctaagctatccaatccaatagttgctgaacccacaatgccatttaaatttatagtaattacaattaaatataattaaacattcacttcctcttttgctccagccaaatttcaagtgctcaatagccacatggtggctattatactgaacagcacagatatagcacattttcattattgtagaaagttccattggatagtgctgccccaaaccttaattcaaaagttagttcttcaaggaaggagcattttctctaccaataccacctccaactaagtcttatttcacttattaaatgttttcacagtgccttgtacgtctctttcatagaactccatgtggttcgtgaatcattcattttttgttatcaaataataaaatcattctataaatcaagaataaaataccataaaatgaaacaaaataataagatatttcactttttggattaatgtatgtcttccctactagattttatgtttcaggagggcaggagctatgttttgcttacccagagcctgggttatattagacccaggaagtgtaaaaaaaatgaagggtcaaaagaaattgagagcactttgggaggcccaggtgggcagatcatgaggtcaggagtttgagacccgcctggtcaacatggcaaaaccttgtttttactaaaaatacaaaaattagctgggcgtggtggtgtgcgcctgtaatcccaactactgaggaggctgaggcaggagaatcacttgaacccgggaggcggaggttgcaataagccgagatcgcagcactgccctccagcctgggcgacaaagcaagactccatctcaaaaaaaaaaaaaagaaaagaaaagaaatggagacctccctacttctacccactggagaaaacttgagaaaggatgtagggcaaaaagtgactcttgaactcttaagagaagacaattggaactggaggaatagaatggtcagaagcgctgagatgggaacatcaaggatcgaatcctagctgtaataggtggtttctaataggaagaaggaaagggaggctagaattgacgatacaggggtaggtgagacagctggctcagaccaatggggagctcctctagaatcatcctgagtttgagattgaccagtcttgcaacagattcagaatggctggcagagaagaaactaaatttaaggatgtcaggaggcagacatcctgatgagtttcagaggctgagatttttttttttttaaactataaactttgggaagactgggaccacgtctctcttgaccaggatatgttctctgtgtctggcacatataggtgcttaatatttttaataataaatggctagattagactattggcagaggaataaataggagggctgagactgagaggctttaggaaggcaggcgtaactggacttggcaacaatggagaggaaggaggtagaggctatttgagtttcagttcttggcagaatgttggggtcactgatataaatgagagtatttggcctttatttcatcatcttatcatcaaatggcaataccatacctaagctgggatgctacgtaggtaaaggattaggactgggtttatttacttcactggtcactagagtagcttttacaaaattgactgccttcaagggccttccaggtaatgcacgccccaacacaagctgtatttgtcttcttgctgttccccctcccaggacctctgcgctcgctgttcccctgcctggaacactcttcccccagatttccatgaggtccactcctcatgtctttcaggtgtatcctcaaatttcacttgcatcttgcataggaaccacctcctccttgcattcctaatccccctgagtaatcacttgctagtatactatatctacactatgtaatttatttgatttattgggtattgtctatccctactaaaatgtaatctccaaaagagcaaggattaaaaaaaaaagtttttctctccattgtttttccaatacctagaagagaaaattctgcacagcctgaccctagaaggggcttgattattttcgctaaggacttatggctaagtgagtgattgaactgtgtaaccaacaggtagtgatggagcctgagggaactggtgattgcataactcctcgcacgcccccaaagctgacaaaggcattcaaatcaagatttaaaagaatacagtacctgccactcagaactctactgcaagctggattatgtctatgaagccccaggctttgacccttgctctaaatagagctaaggataaaaccaggtatgcatctgaccctccagttctcagtttggagggtttctaagaaacaccatctccccacccaatatggcagatcttgctgatttaaaacacatgcagaattgaaccatttcccacaataagaagaaagtgatacacaatcccttccccaaatatttgtttgctgccccatagctacgagttgacagttgttagacatggaacaggttaccaaatgaggttgcagaaatctctttctctggaaattctttagaagagcaatgtgctttctctctagctagggaaattctcttgattccaagctgttacaatgagattactgggctgctttcttcttccattaataagaatataaaaaagaattcttaggtcaccaggtcaagccccagaggccttctgggtagtgtgactctgacagtcatctttctgggatggtttagatggtgtggggtgaggggttgggaatggcgatgttcctcagctgtggatgagcatgatcataaggcatttccttgtaaggctggggaaatagtagtggctacctagctagatcaggtttaaatgcatgccacagttactcttccagtttcttgtgagaggtctctgtttgaaagatagagacgctgagtctttgtgactgaaggccatgattgtaatattgagcactctgtaggtctgttgaggggattcataacatacattgaagaaaatattttccttgctcctactaggttactcccgccatgattcttagaaagatttgagtctatccaattttttctattcctactctttttgcttgtcatttttatatgtgcttacgtgacacagagagcaagcatgctgtgctttgtacataaaaacattccatgaacacaataaggcattgagtgcatttcctatcctattttctataaaggtttactggtttcaaagtaatttcagactccactgatcccattcaaagcctttgattcttacttgggaggtatctctcactcaggaaactgaggctcagaaagttgatggagttagtgcaggattacctgacctagaagtggtggagttggcaccagaaggaagttctttggacaccacatcctgtgtttgtttctactcccaaactgccttgtggtatggagtttgagtcatctatattttctcacccaagtcctcttttgactaactgcagacctgtgtgagatgggcttacccaagtcagacatgcactttctgggcacagaagccaattgggccacatagcaagtagaagttagggctgggtgattgattgattggtatcccacatggaaagatttgaagcaactaatttgctctaatataaactgctacttactgtgcactgatgccagatgttgagctcatcacaccttattttgctgaattctcatatcattgggagatgcaggtttaggtaatagttttgtactgccaaggaagctgcttatctgacttcacaaagttatataactcggaaatagtagaaccagatttcagactcaggtcttctgcccccaaagtcgctgatttaactactatccagtgatttccaagccaagttgtaaggacattccaggcagaaatagccatacctgtaaatgctatagaaacatgaaccagcaaagcaagagaggagttgcaatggctagaattgtgtaacttgccttcagccacgtagccatggtggcagagctaggatttgaattcaagtctttgtgactcattgtcatgaggccatactgcctgtcaggaaatgggtttggtcctcacactgtaagtctagatagatcagtgtggtgaaggcatctgggtattcacttggtactgtgggtcaaggtactaccagcagtcacagatgggtcagcagcaagtgttctctagatcacatgtcctttccacaggatgagtctcttgggcaacaggaaattatctgatgacagaggtgagcagtatggtataatggaaagaaaatagacactgagtttgaattctggctctgcaatctactggctgtgtgacaagtgcaagttccttaacctctctgtgcctgctgttcaccctttccctcgccaatcatccacttcttttattttgttttattttttttgagatggagtctcattctgtcgcccaggctggagtacagttgcatggtcttgggtcactgcaacctttgcctcctgggttgaagcagttctcctgcctcagcctccctagtatttgggactacaggcacatggcaccacacctggctagtttttgtattttttagtagagatggggtttcatcgtgttggccaggctggtctcaaactcctgacctcaagtgatcttcccgtcttggcctcccaaagtgttgggattacaggcgtgagccattgcacccggcccccacttgtttttcatgaaaaactaatattaaatgtttcttttggagggctttgtaaggattaaataatatgtatgtcaaacatatggcacatagtagatgttcaatatatggcaatgctttattaatatgacttgaaaaaaattactgcttttcttttttggacatttctcataattatgtgaagctcttgtttgaggaacatgttaaatagtaagaaatggaattctaaattataaatctggtatttccaaacaggaaaaaaataattatatattttaaggtgaatttcactaaatgaggatggacatttttgagttgacttttatgggatttaaaaggttgtagtcatgttttaagttaatagaaactggtcgctcatgctttttctataaaggaaaccatagaaacaaaaataaaaaatagaattaatcgataaatctattattctacaactttaaaaattatacaaacaagtgtaaaatctatatcctcctcctgcagttccaccctcaggagcaaccactattaacaatttgttgcatattcttttttttaaaaccttactaatatatcatggatgtctttccattttatctttcatagctcaactcgttttaaaagtatttaacagcttgatgtatgatttatatatcataaaatccagccattgtaaatgtataatgctgttattttgtaaatttatacagtggtgcaatcatcacctactccagttttagaacacttattactccaaaagtttccttacacctgtttgcagtcaaccccaagccccagtcagaggcgctttctgtctttataggtgttctttttagaaattttatataaatagaatcacatagcgtgctttcttttatatctggctcttttcacttagcataatgtttttaaggatcatccatgttgttacatatatcagtagttcctttttcttgctgagtagtattctgttatatggatatacaatactttatttaacagttggttaaactatgatggatatttggttggttttcagcttgggaatatcaataatgctgctatgaatattcacatacaattctttgtgttgatgtatgtttttattttattttatttggtttgttaatattttgtattgaagttgccgggttgtgtggtaagatgtggctgtattttacatttccatcagcaatgtataagggcatcactttctccacaattctctaacacttggtattgtcagtctttgtgataatattctagtaagtgtgcagtagtatcttattgtgattttaatttgcatttccttagtgactaatgatttgagcactttttcatgtgtacattggccatttgtatattttctttgcagaagtgtccacatcttttgccaatgttatcattgggttgtttttcctcttattatttgagttttaaaatatattttatatgcaagtatattatcagatgtgttgtttgcaaatattttcttccagtctgtagcttgtcttttcgttttctaattgtttcttttgaagaaaaagatttttaaattttgatgaagtcaaaattttttcttttgtgggtcttgcttgctttttataaaatcttcatctaatgcaaggttgcaacaatgttctcctgttttcttctacacattttatatttttagtcttacatttagggatgtgatatgttttgagttaagttttgtgtatggtgtgaggtaagagtctaagttcttttttgcatatagtcatatagttctagcatcactgtcaaatagtctgtcctttcccccattaaattatataggcacatttaccaaagccaattgccataaatgggtttacttcttatatctctgttctattgatttataaatttatccttataccaataccacataaacttaggaatgctagttttatagtaagttttgaagtcagatagcatatattttccaagttctttctattcaattttgtcagtttctacaaataagtagataaataaataaataaaacctgctagttttttttttttttcactttaagttttgggatacatgtgcagaaagtgcaggtttgttacataggtatacatgtgccatggtggtttgttgcacccatcaacccatcatctaggttttaagccccacatgcattaggtatttgtccaatgctctccctccccttgccccgcaccccctgacaggccccagtgtgtgatgttgccctccctgtgtccatgtgttctcattgttcaactcccacttatgagtgagaacatgcggtgttagaaaacctgctaggattttaatggagttgtggagaatctgtaggttaatttgaagagattaccatctgaacaatgttgaattttccattttacgagtgtgacatatttctccaatttttagctcttcatagcaatgtttggtagttgtcagagtataggtcttgaacttcttgtgatatgttaattcctgaatgtatttgtcaggtttctccagagggacaaggccagtaggaaatatatatgtatatgtacatgtatgtatatgtatatattcatatatatatatttatatgtatatagtcatatatatatatatatatatgaaagaaagtttgttagggagaattggatcacatgattaaaaatgtgaagttccacaataggtcatccgtaagctagggaatgccagtagtgtggctcagttcaagtccaaaagccttgaaaccagggaagccgacaatgcagtcctgaataagtctgagggtgaaggcctgagagccccaggcaggctgctagtgcaagacctagagtccaaaggaagatgaacctggagtctgatgtctaagggcaggaggagaaaaggtgcctcactgcaaaagggagagagggaggaaggtaagcaatctgagtatcccccttgttccacctgctttgttctaatcacacccattactgattagatggtgcccactcacatcaagggtggctcttcctctcccagtccactgactccacatgtcaatctcctctggaaacaccctcacagacacacccagaaacagtgcttcactaaccagctaggcatccctcaatccagtccagttgatatctaatattgagcatcacactgagtatttcactttttgatgctattgtgaatgggattattttcttaattttattttttatcttttagttgctattaagtagaaatccagttgatatttatatgttagtcttgcatcctctcatcttactaaaattgcttattagttctagtaatttttttagcttgtagattctttaggattttctgcatatgagatcatgtcatctgcaaagaaagacactttaacttcttttctaatctgtatgcttttaatttacttttctcactttattgcaatggctagaagctcaagtataaggttgaatagaagtggtaaaagtgaacatccttgcttcatttctgatgggggaaagcattcatgttaccattaagtatgatgttagctgtaggtttttgtagatgctccttatcaggttgtagaagttctcttctatgtctggtttattgaatgttatatttggagggtaggggttcttttttctgcatctgttgagatgatcatttggtgtttgtactttgttctgttaatgtgcgtattccattaattaatttatggatattaaaccactcttgcattcctgggatgactccacatagtcatggtatataaaggaaagttttacatgctggaagatttcgtttgttaatattttgttaaggatttttactatgttcatgataaatattagtctgtagtgtccttttcttatgtatttgcttgactttggtatcagggtaatactggctatgtaatatttgttggaaagtgttcccttcttcactgtattttagacaagtttgtgtagcattggtaccatctcttccttaaatgtttgataaaatttcccagtgaagcatttggacctgtagtttttttattttttgtgggaatgttttaagcacaaatttgatttttcaaaaaaaaagtgcttctcaatttttcacatggctttggccaatttccataaccccaaaatggtggtttttgatagttttgtccagtttattagttttattttgctaagaggattttttgacttcacaccgccacacccagcagttgcctctctacctctttttaaaaaaaatctgtatagtatttcattttacaaacatgccataatttatttaataaaaatagttttttcacttttaaaatatagtctgagcagtgctgaagctaaccttcttctatatataactttacttacttttgctaataagatacgtgcatttttaattttaataaatgtcaaattattctccaaagtttgttgtcattaattatattgttagaataatctccaagaaggtccacttctgcatatattgccactaccatatacaggttaagcaaccctactctgaaactaaaatgcaccataattcaaaactttttgagtggcattgtgacgccacacatggatgtctaagatagtaacatttttgttttctgatgattcagtgtacataaactttgtttcatgcacaaaatcattaaaaatattgtataaaattaccttcaggctatgtgtgtaaggtatatatgaaacatatatgaattttgtgtttagacttgggtttcatcctcaagatatctcattatgttatatacaaatattccaaaatctgaaaaattctgaaatctgaaatgcttttgatcacaagcatttcaggtaagtaataacagcctgtagtattaatcttttatatttttgccaatatgaaaagcaaacagtttgatatctttttgtttgtacttatctaattggaggtgggaatcttctcatatgctctttgaccatttctttttattttatgaggtgactttttattcctttgcttaatttccaattatttttaattattattattatttttttttgagatggagtttcgctcttgttgcccaggctggagtacaatggcgtgatctcggctcactgtaacctccgtctcccaggttcaagcaattctcctgcctcagcctcctgagtagctgggattacaggcacacaccaccatgcctggctaattttcgtatttttagtagagacagggtttcactgtgttggccaggctggtcttgaactcctgaccttgtgatctacccacttcggcctcccaaagtgctgggattacaggtgtgagctgccatgcctggccttaatttccagttagtttggttctttttttcttatttataggatcttttgggattatagtgatactaaatttttatctgttttatgttgtaaagatttttttctattctgtcattccttccttctagttgtaactgttttcaatctttaaagaccctggtgttgtaatttatgtttttatttgtttttaaaacagaaagttgtacaagggattgatttaaaccaaattcgaggacttgggtttgatgccacgtgttctctggttgttttggataagcagtttcacccattaccagtcaaccaggaaggtaagaccatgtctcttccttttcccagtggtgggatacttggctgattaatccaatgggcccaggtggaacaggagggcaggcgtctcttgctgctgatagtaaaatttagaggtagagtgaagtgacacagatcatgttgcagaagtcaagagcttggagagcagttggtatgagtggggtggtgttgacgctggattagggggactaggctttctaaaactcaggagccacagtgcagagcttggtaaaggaaggatatgagattgttagctaggagtgattaaccttgaaacacacaggtggttttgatgttttctgagaagagagtgtcagtgcttgcagtttctttgtatacgatattcctattccgtgcttatctgagtggatgagccaagtcctttgaaaggaaatggaacatggtagacagggccatgtgacagatagaaggtagaagcagatggcctctctattttcagtagccagaccaaaagacattcacattaaatggtgttgtcctaatagacacttgtgagtacagaaatgagctgtttgaaatgtaaagtgctacttgggtccaccatcagagatttttcacagcagataaggttgtcccttttggggaattttagccaataacgtttgtactggggttacaaacccgaaagtctattaatatattaatgtaataattaatacattagtcagatgggtaatgtaaatgagtaataggccaggtttgagaaaaaccactgcacctgtgtgaagataaatttcaactgatatttaaccttgtaatgagcagatgacattagggagcagtggaggctgcattgcactggaaattgcatgctccatctgaagggaagggccagctctaggcattgtcagtcagctgttgccaagatagccattgcaaacatatttggggctagattctgttagagaacccttgattctgcacactgttgcagcagcatctttcttaactgttggctatgaggtagtagggtacattgatacacagtggaattagagttaggcggggactctgattgtagctctgctgttgctgagctgtgacaccttgggcaagccacttaactctgtgtttctcagttttcttctctgaaagaatttgaatgaatcagtagctttgctgtgagaatttagtgagagactgatacttaaaatgctcagaaaagtttcttccatcagatgatgaattttttaagttaagagaatattccggtcactactgtggacctaatgtatgaaatagtgattattataattataaggactataaatgatcatctatttgcatcccttttcactataagtgatcactataaataatcataatcactatgtgctgaaaatggatgcaaatagatgaatgattagagcacagtggtaatgatgaccattttctgcacagacacacacacttttttccctcttcttgcgacatttattaacacctcctgtgttccaagccctgtcttagcaaatgctggggcttcaaagataaatcaggacggttctttttcttggtggctgttcattggctcagttggcactgttctggcccaggacagggcagccttgttctgagccatttcagaaagcagagaccaaacctgggtagagcaaacctcagctctgcagcagcaagcattcactaattacaagatgtggccagccacagacctggccgttttgggaggctgtcagtatatcttttatgggctttatttaagtaaaggtcaggtgattgtttgggatgccatagatcagatgtctcttactgttgatagtgagatttagaggcagagtgtggaggctagaaatcaccgtcccagaagttaaaagcctggagagcaattggcacgagtggggtggtgttgggggcagagttagagggaacttggttccataaagcacaagagccatgttagagagcctgattttgggtggaactttagatactaagagtcctgtttcaaggattttgtatcatctgatctgctaaaatacatgtttacttatttatttttattctggctgtgcattagtatcaactggagatctttttaaaaattgccaattcatgagccctaccctcaggatttgtattcacttgacttgaggtggagctagggtgtcaactttttaaaaaagttttctcagtaagtctagtatgtagagaatcactggggacagattaacggagaattaaaatattaggaacagaacacttgaagtggaagaagacagttccttgttaaatttgcttaaatatgtaccctctttggatgctatttttctttcattgtaggtagaatggcttcctgttaacaaatcctctattaaaaaggtaactaggttatcactctaattataagtgttgaaataactttattccacctaaaaggttaaagtgtacccattcatcaaatgcatccagctgcaggtgccctcatcagtttcttgcctttcaacagattgtattaaggttagatcttttatctgaaatgaattatcctgtgcaagaaaatgaaattagaattataaaggtggtttgaaggttctttagagactcctacctgcatggcagcgaccaactcttgattggctaatgggagtaattgtgaggagcagagagtggggtcaggaagattccagataaccctaatcatgcagataacctaaaaccaaacccataagaccagcaaaagtattgccgtctttagatgttaaccaaaaaattataaacgaataaattaagtacaatagtttaagaaaattcagcattagtctatgataaaatagtctcatttgcctttccttgtttgactcttcttccttaaagatcagaacaacccctgggctggacagcagcacagttgctgaatgcttcctacccctgccactgaccaaactcagagccttaccctgattgtgtcatctcagccataggagctcttgggagggagaggaacaaagggtgataattggggctgggagagggagttatgacctagtctcctctgtgcaacagatacctaatgtttagatttttttgctgattcataatattttttcccctcaagtatgcctgcaacacattctgtgaacataaacatgtattttagcaaggtattaattaagtgaatatatggatgaataatctacccttaggtaaagtgaggtagctcaaatgtaactttacctccaattctcttaaacgacaacatttttgtgggtctgtgttctgtttcccatgctgccttattgtatagaacctctttctcactctttcctcacctgcctagccattggctagtcatttgaagaattaaataaacactttcctgccttttgaaagctttctgtgcagctccaggctcagctaactagagcctgctctttgctcctcctccacattcccatgtctggtactcttgttctggcagtcaacacacagtatagactctttctcctgcagacatatgttgcttaagggcagaactgtggcacattcttcttgatatcctagcatccaacactgtgcttggcatgtagtagatgctcaataaaagattaaatgaactttcagttttccataagagctgaaaaaaattaacttctcagtttttatctaaaacgaaaattattaattctaatacagtaatgattctgtacaattttcattgtattgttctgactgcattttgagagcatctttatgtagaggcagtagtagctgattggtctgtctttactataggcagaagtttagcaacaggtatttttaccttaaagtagctgtagatttgttctgtacagtacttaagaaacaatactgatattgtccccttcaacactcacccacccacacatacacccacatcctgattcattgatggttgtggaataggagctggacatcagtatttttaaaagttatcaaggcgacgctaatgtgcaactaggtttgagaactagagctttgagcacttctgttagatagaggaacaattctgtttacaaaaaattctttgacattcctgtggaaggtcccatgtactctgtattattttcaaagtattagtataatggtttgtggagcttttgtgggaggtgatatctttccagttaggcaactgagcccctgccttgttatgcccatgaccttatttaggtatcttcttacattggctttttttgttgtttttttttttggttttaattttaaacattcttttcaaagatgtggaagggtaaagaaagcaacatcttcctattcgcctaccactgaggataaacatgaaattttgccatatttgcctcagctccttttattttaaaaaaagatatttgtaacttcagcttttcacctcctgcaggtaaccattctgctgtagttgctgttcttaaacacattgtttttgtgcttttactacatatgtgtatacccacaacaacaaacagtatacaatccttcctctgtatctgaggggtacttgttccaggacctccttaagaccataacccacagatactcaagtccctgatgtaaaatggcatcgtatttgcgtataacctatgtacgtcttcccatgtacttcagataatctctaggttacttataatacctaatgttaggtaaatacttgttatactatattgtttagggaataatggcaagtaaaaaagtctgtacacattcagtacagatgcaaccatccatttaaaaaaatatattttcaatccacggttggttgaatccacagatgcagaactcacagacatggagggctgactctgtgttttaaagtatctcagctggtgtccttgttcatgttactatgtctaactctagtttattcatttaagaattgatttatctgttctctatgcagatctagttccaaaatacactttgtgcatttcccagctgtgagacattgggtacgtcttcactttcaagagtctgtcattgaaaaacaggggttaaaaacctgtatcagagggttgttttgaggattaaatgtgatgatatgtgtaaaatgtttagcacagggcttgggagacaaacacacattacaaacatttactattagcaagatatgtagtgctgcggttactttgccattaaataaaataatgtgtgaaaatataatacctggtttggtaactgctgggtttcttttctctttgccctaataatctctcgggtatattaattgctgttctgcaacttttgccatcagaggcatcagagggctgttaaaggatttctggcttgcccattggtacaggatgaattaacagaggctggggagagagataaggagttactgtgtggactacagggtggtaaggcaggatatgaggggcagtgctccttttccagctggttttaaattctcctccttatgattttctcctcctgagggcctactttctgagaagtacttgccatatcctttatgtgcattatcttttgtttaaaaacttcctgaattatacatcttcatctgtaactgtatcttcatctgtaactagcattccctgttagatctgcctaattccaaaacccatgagcttcccacgccagcaaacaagccaaccaaatgaggaaaaaaaaaaacacctacataaactaattttaattaaagtgaccagaaaaagtgggaatataagcagttaaatgccattgtttagctattagatgtattataccgtcaaagtatttatccatatttaaaggagacagatcttagaaagtattgtcttagtcttatttcatagacacctttcctgaatgtatgcccagaaaagtttttctagaacagaagggataagaaaggaagggaagaatttgagagagaatacttgataatataattaattggtagatgttttctgcttttaatgtagacatttattctaaggtcatggtcagagaacacatgactggacgggaaattccaggcctggggacagtgctttcctcagccttgctggtgtcctttcattttgcacactcttgatacataaaattatagaaagtacatagcattttgatcttgggaatccataattgttcccttgaattagaaggaagagaatgtgtgtccatctgcatctccctctcgtttctgctaggggattcccatcgaaacgtcatcatgtggctggaccatcgagcagtcagtcaagttaacaggatcaatgagaccaagcacagtgtcctccagtacgtcgggggggtgatgtctgtggaaatgcaggccccgaaacttctgtggctgaaagaggtgagtgcatagggtctaagagaagataccaacaatagtagaggattcctgttactgtggacctgtaggtaccaggcaccctgctaaaatcggttatgtttgatttttcccagcaactaggaggaaggttgatcccattttattgattacagtgtagttaaatcacacctgtttttatgtgcctaactcatactaggcactgtgacaagtattgtacacattatctctttgaaggccaacgaccctatgaagtgtttgtgtgtggtgtttattttagggtgtctgttttgtagacaagaaaacgaatgttcatagagataaaacaactcactcaaagtgacaaagtaaatatgtgacagaaccagaatttgaacctaagactggctgactccaaaatcatttttttttaattttaaaatgtttcttttgtagagacttggtctcactattttggccaggctgatttcgaactcctggccttatgtgatcctgcaaaagtgatatgattataggtgtgaaccactgtgcccggccatccaaaatcaattctttttttttttttttttttttaagtatcaatttctcttttaatcttagacgtcgtggtggaaggaaaaatcagttagcaaagaagcaatctcagaaaaagtgtatctttttgatgcctttatgccttttttttcctctttttttttcggttattctttattattatactttaagttttagggtacatgtgcacaacgtgcaggttagttacatatgtatacgtgtgccatgttggtgtgctgcacccattaactcgtcatttaacattaggtatatcttctaatgctatccctcccccctccccccaccccacaacaggccccggtgtgtgatgttccccttcctgtgtccatgtgttctcattgttctattcccacctatgagtgagaacatgtggtgtttggttttttgtccttgtgatagtttgctgagaatgatggtttccagcttcatgcatgtccctacaaaggacgtgtgaactcatcattttttatggctgcatattattccatggtgtatatgtgccacattttcttaatccagtctatcattgttggacatttgggttggttccaagtctttgctgttgtgaatagtgccacaataaacatacatgtgcatgtgtctttatagtagcatggtactggtaccaaaacagatatatagaccagtggaacagaacagagccctcagaaataatgccacatatctacaactatctgatctttgacaaacctgagaaaaacaagaaatggggaaaggattccctatttaataaatggtgctgggaaaactggctagccatatggagaaaactgaaactggatcccttccttacaccttatacaaaaattaattcaagatggattaaagacttaaatgttagacctaaaaccataaaaaccctagaagaaaacctaggcagtaccattcaggacataggtatgggcaaggacttcatgtctaaaacaccaaaagcaatggcaacaaaagccaaaattgacaaatgggatctcattaaactaaagagcttctgcacagcaaaagaaactaccatcagagtgaacaggcaacctacagaatgggagaaaatttttgcaatctactcatctgacaaagggctaatatccagaatctacaatgaactcaaacaaatttacaagaaaaaaacaaccccatcaacaactgggcaaaggatgtgaacaaaatcaattcttttaatacccagtattctattggagttcagagaggttaattaccgttccaatgagaaagcagccgaggtgggatttaagtccatatcttctgaccagagctttgctgttctgtacacttttagccccaacttattaatatttggccttgttgacatcttaggctttccctttctcatcccacctgcactcgagtttctcatccttaaatgatatggcaatctctggtcaaagcacttgcaggtggctcccatttccagatgttaggacttctttctgaagtgtggagaatggtgatgtcagcttaatggttcccattagagatggatgtgtgagaaagttcaagtcctttgggaatctcaaggacttgaaaacctctaggtggtctggagaagtagagaatccatctaatgagcatgacctgctgtgattcatttactggctctgagatttcaggtgggctgagtcttctattactcagattgtaaatggagatggggagagcttaggttgctgagagggtgcctaaggattgccatcacggggcaggagagtggtaggaaagaagggcttcagcaatcaaagcaggcttggctttttagctattttatatattgagctgttttgtaagttttaatctacataaaggcttctgtggttgctaagagtttgaaaacagagtttcttaggagtcaggagttttcaagaatctaattctgactctactgtcaacaattgtatgctttggtcaaagcacttcttatttcaggcctcactttcttcatgtataaagtgggagagttgtattaaccagtttgaaaacctgactcgggtatatactgaaacacaaaattggaatatagaactgttctgcgctgcccggtaccctgctttgagttgtataagcattagttgattttaatcctaatggtctgtgcctggtagatagcacaggaaactgatcctaaggaggttttcccaaacaggtgatagagccagaatttaaatccatgtctgctgggctccaaatctcagcttattccatcatgtcatgcagtagtaaaatccctctgtgaagcatggctcttggcgtaggaccaggaatgatggcagtggtcttcttcaatttggcctaaacttgttgctatatcaacaagtttggattggatatatcaccttttttggcaacacagaaagaaaagttatactgagttaagcaaagaggattgggcggagggtcattggttcagtgtcagggccttctagagcacttgccatgtggccagctccagcctatatcccaggagatctaaatgcatatctggcacgaacctctcaggattcttaccatctcgcacttgagataaaactgcactaaataaatcccataggaaatagttaaagtctagattacatggcagtgtttgtgaccctctgagaacatcttatattaatttattttaaaaaatcaattttctttcagaattttctgagtaagcctctagtgtggggtgtgttttggtaagcatgtacaggaattcttgctgagaattcctttggctttaacatgattgcaaaatcaaaattaaagagatttctaaagtcagttttagcatcttcttaaagcctgaccaggagggctatagtgcttctcagacttcaatgtgtaaatgaatcacctggagatcttaggttctgattcagtagctttgggatagggactgaaaatttgagattttgtatttctaactcaagttcacgggtgatgctaatattagtggcctgggaacttgtgaaaccacttttaattccaaaagctctgctcccctaccctgaaaagcatccacttttggggaatcagggaatggtacctttgtttttaatgctatgatgggagacacaggaaagtttgatagcttcagtagagctgctcaagtgcccgttcagtataaaagcatgagattctgtgttctaagttcatcaagctgtcatgtgtttactccttcttcattctttaattcttggaagtctgtactgagctcaactatgaaccagcaactgtgataggcactggggaactggggacaataaggactcaaccttaccattgagcagcacacagtccactagggatagtggtaggggagcataaggaatggggtggatgcaggagtgacatgaaaacagagccatcaaatgtactatgcactgtgatatagcaatatacaaagtgctttgggaaaaaggatttgcttcccagaggcaatagtttgacaggagcctcaagatatgagtagaggttttgcctagcagagaagataggaaagacattctgaagagagactgtggttcatctgtgttatggtaggtgagtcccagggcatgagctggggtgcttcagcaagcatagcaggagatgaggccaggtaaatagtctgagttcggcttattaagggcttatttggtgatagggattggttgatggttgttaagcaagggaggggctggcttaggtaactggcagacatgtggagattggattagggtgagaaaatgtgtgtgggggagtaagaactagagttttctcattcccctgatgatagcactctgatggctttgcattgctctgttagataaattccagaaactgaaacatggactagaaaatggtgcatgatgtcatttttacctcttcctctctcgtcactgtttgtcttttacatcctagctcactatatcccatctacaggaatccacttagagttttttgttacatgagtcttggctagaggttggcagactatggcacccaggccaaatctggcctactgcctgttattggatggcttgagaaaatgtaaatggttttacattttcaagtggttaagaaagaatcaaaaggatgatattttgtgacttatgaaaataatatgaaattaaaattttagtggccgtaagtaaagtttgattggaacacagccacactcatccatttatgtgttgtttatgtctgttttcacactacagtgacagctgagtagttgagacagagactatgtcgcctacagggcagaatatatatgtaccatctggaccaacagatgaaaagtttgccgacccctggtcttgacaatgctgagtctttcacctacagtgttcttccctctactcactgctggttcttcctcatcatttaggtttcagttttatttttgctctcttgaaaagcctttcctgatcctcaaatacatcagagtctcttgttattacactcttaattttacttcattatatctttcgtaaattgtaatgctacgtcaatttttgtggtgatttatataatgcttgctccaaccattgtaatctgcaggaggatagagatcatatccacctcgttctttgctatgtcttggtccttaaccaaatggctggtgcacagtaggtgctcagtacatattttctgaataatttgaatgactcaataactcaataaggggctgttacagtactccatgggagaactaatgagacctgaatgaggcactgtgagatggcaggagatgggtcctagaaatttttagaggataatatcaatagaacattgacactgattggctgtgaggagtgagtcagatggaggagccagagctgaccactcacttcgttattgctgtcatttatcttctccttgtccttagcctagagtcagatgtcagaggaagttgggcagaatttggggttttatctgtcttgagatgttctaggaccaccatagctcttgaacaaagtcacctggatcctagtcctgcaaatatggaatttaatcatgtccttttcatttaaagtttatgtgtttcaggttgacatttgtctccttaataagaattgtcagatgaaaggaaaaatgccatttgaatttttcataacccccagcagtctggcttttccatttggtctcaatgattctgactctcatcttaatgaaggccaaatgtaaattaagttctgtcaggcttgagcagctggggtctcctatctttataaacatgaaacattgtagggttaacaaggtgcagactgaggaaggtcaagagagttgctgagctgatgtggatcctgacagctcaatgttaatgggaggtaattaacgtggcttgtaggggctacatggagatcttccaagctgtcttttaactcatttcctcttttgccattgtcagcagagcagaaagctaatcattttatagtttgagatttttcttgcttattccaaagttctggaaccaactgtctggaatgtcacaggattttgttgatggattcaggaaatatacctgctgcttctctctcccctgtctgtgcccctgtgcttctgtcctcctgataacatactgggaaaatgaggaaatgattctccaattggtagattctttggggggaacctgggggtttggatggctagagaggtggtttgataacttcctgctagctgtggaagctgtcacttgagtgctttgcagtaggaactgctgaaaagaaaaccctgctgcaggtcagggaagcttggttcttctagttctttctgtaacttgagaggctggacgaagctaatttttaaaaccttatttggccttattttgtcactcttgttgatgacataataacaccttttctctatcttaaaccttagtctaatcttgaaacttcatgaaagatagacaatataagtttctttccttgaaatgccatcatttaaatagatggcagtatggtggaaactagtctttcttagttagttactgtctaattactattcaactgtgttcatcaggtcttaatagtagcactaatacaagatattgaggaactttgggagatataacacaaatctatacagaaaagtacaggatttggagccaaacttgcatttaaatttttctgtaccacttaccaattgtgggatcttggacaagctaaaatcaacttctctgagtctcagtgtgctgagctataaaatgaggacaatagtatcagtcttgtagagttatgagttagtgaggtatttgtaaagtggcttatatagtagatactcaaatggtactttattttcattatcattgtgtttaaaagtgcttgtttctactgatgggcatttcagtaacatcctatcactaactgagataattttaaagactaaaatatcctatttcatggggctggccataatgagtgatatgttttttcctgttttattaaggaaaattctagaaaccatcatcaaagtttctagagacaatcatagaaaatagagaatagaagagcacagaacatattttcagtcattcatttatttgaatcacccacatcctatgtgtaataccaattccaaaggcagccaacttcgagctgtaaagctgattaacttacttgagtaccttctacttgtttcccttgacatttaccagtgccgccagtctcagaatgtttttacttcacaagagttattttatttaatctttacagcagtctgtgggacagatattatctctttttatattaccagatgaggaaactgaagctcaaaaaagttaaataacttactcgtggtctcatactatgtaagcaaacccatgtcaagagccacaccattagctctgttccctcatctgctaccttatgggaacctgtgcactttcagtgtgggaatccagaagtggtctctgccaccaagaaattacagtctagttaaagaataaagatacagagcaaccaagcagtaagagcagaacaagaaaatagatgaaaataagagctaaagcgtatgtagtgcttgttaatacatctggtacttttctaagcattttacccatgataattcatttatttctcacagctaccctataattattgtatttttcttttcttttcttttttttgagagggtcttgctctgtcacccaggttggagtacagtagcacagtcttggctcattggaacctttgcctcccaggcttgagcggctctcccaccccagcctcctgagtaactgggactacaggcacacaccaccatgcccagataatttgtgtatttttttgtagagatgaggttttaccatgttgcccaggctggtctcaaactcctgagttcaagtgatccacccacctcggcctcccagagtgctgggattacaggtgtgagccactgtgcccagcctaattattgtcttttacagatgaggaaacaggcacagagactttaagcaacttgcccaaggtcactcagctaataagtggcaaggctgggatttgaactttggcatttcacatccagagtacgggcttatcaccattttgctctactgcctctttcagcgtttgctttgcaggctttgcataaactagtttagggaagaaatttgtgggtgatggcttcgggaggatctgaggctgtgaacaatggtcagtagcttcattgtttcatttaagaaatactgagtgtctcctgtgtgagaggcactttgctgggcgctggagatgccaaggtgaatgagtgggataagggccctggggtaggcttctgggaacttagagtctagtgtagagaggcagaaaatagacacacacaaagtaattttgttttctggaaaatgctacgaaggaaaaacacagatgaacagatttggcatagcgagtgtgggcctctcttgggagtttttgtttgacctgaatgatgagataggaaggaggagcaacagattcactgtgggggaggaaagcacctcatgagatcagcaaaggaggtcagctgggccaggagggtatgagcaaggcacagaggcgtaggagggggtttggcgaagtgggcaaaggctgctgcatgcagccttgaggccaggggcaggagtttgagttttattccaagatcagtgggaaatggttgatgggctttaaacatgggtgtgacacagtatgttttatgaccttaaaaaaatcattctggcatatgtgctaggtagatagtaaatatttgtatagcaacaacaaacttcatactgttttttttttattattatactttaagttttagggtacatgtgcacaacgtgcaggtttgttacatactgtaatgttaaagggaagaaaagttagaagactaatgaacagtcttataaatacatttgtttaaagaaactatcagtatggaaaaaaagactggccatatacacacaagaaaacattaatactggtacactgttcatggttggaagagtttgctactgttttagcacaatgctcatgcttttattacttagtaattttccattcaaagcttgtagtcatagctaacctttctggttgacaacacttcattattgagcaagggattttttttttttctttttgggcttattttcctaaaaagcaacatgctagggacttcacaggcagaattttatctctgccctttagtgacacagtgtaacagcatgctgttttactgtatctgtgtggcagtatgaggaaaccaagactcagaggacttaagtagcatccccaaagctacacaatagtaggttgtagagcccagattctcacctagtccagtctgcctccagctcctgggatctaactattgcctctcactgcctgcttttaaagggcactcatttcttcccacttgccagggctacaggctggcagaccactggctgaatctggtccccaatcaggtttagtttgacctaccatgtgcttggaaaaaaaaaataaacaattttaaattagtttccaatatttaaaaattgagaaattttatctgaaaattcagattatttattttcctgaataaataatgaaagaacttggcaatacagggtccacacttccatgcagaagggaacggctggagctgaataggggctgccttctttagaaggggtcggcattcttcattttgcagcagtcctcacccagcctgctacactcatttcctttttcagccctacccctctgagcacttgaatttgagacttaggctgtgggaatttgttcaaggaatctgtcattacttttcctctagcaagcgcttagagaaatggaaaggcattccagatggcgaatttcttggtccagggctctcatgattccatgcctgtattctctcacacctctgggtctttgctcaggtttttccttctgcctggcaaacttatagtaatttcttccttcaccaggaaaacttataataatagttcaaaacccagccttcactgcctccaggaagccttccttgacttagggtcctacactctgtcccctgtggcattctatgcttatctctaccctagaatttattgcattacattgtgctgtatttatctcagtgtccctagcctccagagcaatgtttaaattctaacattaataacttattatatattttgatgggtggatgaatgagcggatgaacttattaaatcatctcatgccatttttgatggctaggtgcatttgtccaatcatttcattccaaactaaaggttcactgtatgcccaacataagttaattttctcttcctcattgtggaaaatgagatttgagcattactgttcctttccatcctagagccaccccttggctgcagtcctgttaccggagtcacagcttattttgtatgcaaagtgaaggctctagactgagacagtaactcctctgggcctctccactgtgtctttggactcctgtgatggataccactttaagttgctcccttcaccccccaggagaatccaagactcatcttctcaatcagaaagactttctttagaatgtttataccagggccctgtatattggaccagattcctcccagcctttgaggaatgaagacagtattgtcagctgctgttagggcatgtgttgtggattttctctccagggtgggtactggacttgtaactaaatacacagaatgttgaggctgatggcttgccttcatctacctggacagtgaatcctttccttattatcctgtatttgcatatttgatttataccaaatatgtgttgcattcttttagttttatagtccagcaaagtaatttttaaaaggcagacaaaagaaaaaaagttgttggccagataccttgtaacatttaataaatgtcagctattattataatactttaaaaaattttactttatggctatggcagactttcataaatatttcctttatatgatctatgacatgaccttgtgggataaatattactacttctcacattttacagatgaatacaagcctcaaagaaatgaaatgacttctctacaggtatcaaatcttggtgaaggtcctttgggcttaaactggagccaaatgaagtcccttggatcttaatgaaggtccttttggctttaaattctggtatatgtgtgtgtgtgtgttattctgctgtaccatgtttcttcctcatttgggttggtggattttcagctccataaaagcagggaccaaatctatcttttcataccttactgttttatatccccagagccaaacacagtgtttggcattgaaaaaatactcaataaacatttactaaatgaattcatgtcccctggccagccaggagctagccatgtgactgtagtgctgaagaccacatgcctggcttacctgttgccagtcttcctgacggctgtgcagggatgttggccacctctaggagtcattagtgtaaccagagaggtacgaggaaggattgtgaagttaggcttgctttatgtacacatggtatgattctgtgtcgatcaaaaattgaacaaaattcttttctcatagtggctaaaatggaagtcacacttactggaggaaaatacgatctttatagaaacaacactgaaaaggacaatgcatttaatgtgtgttgtgatacagtaactcatagcgtgtaaactgtcaacttggaaatctagaggctcagggtcaatggatgtccactgatgcaaggaaggtggcaggctagaagtccaaaaaggtgcaaaatggtattcttttggaggagtaagtaaatctcatttctctgaacacctgggctgttttactttcttttttcctattatccaaagtgaccataattgttctgttattgtagggatatattcatttaatcagtgaaagaaacttttgtctggtaactactaggtacaaagtactgtgcttggtgatggggaggaaaggaggaagccaagctcaccctttatctcaaggaattcccatatctagtaccaagagcgagaggctgtgaaagccattacccgccctgccacccccccgccatgttttattatcaaaatttcaaacatataaaaaagttgaaaaacttttacagtgaatactcagagccatcacctagagcctgccatggacatttactgtccttgctttatgacttatgttgtttccatctgtctgttcctctactcagcttacatttttggaataagttgggagattgttacacttgggaaggcagtttgaaatattaaaagttgtttacatttctgaaatattaaataagttttagttaagatattgactttgttttattgctatctacatacatggccaacacctgtactagactttattaaatatccactgtgtgctttcaaatcttctatcccatttattcttatgaaaatcctgtgaggtagatgttatcacttgctttgcagatgaagaaattgaggatggagggagttaagtagattgccacttatcaactttattacctctggcaacgttggaatgcaaacccaggtttctgactctaagaaatgaatttgaaaaattattgtaaaggttagctggtcaaacaccagcctttatcacacaggtacccctgtctacagataagacatcattggagcttacctaagtaaagcaaagcaagcaattagaaaatgagagctctcttattttgctgattaattattcattattttcttaataatgactttatttttctatcatttttagtattattacttcactttgattagagaaagcaacttctgatggtttaagttaaaaatcccagataacacatttgtttggcataaatttttaaggtaaatatgaactctagaataaaacgttatcaaagttattaaaagtttagctgttcaaagttagactcaaaatgaaagaatcatacttgagactgggtgagatctgtttcccaccactatgcaaactctgacccagggcctcttttgtttgtattccagcacattatagttacctctccaagagctgactttgtcctcttctttgcattcccctgaggtatttgtagtgagaaagaatgactaaatgatggaatgagttcattacctcttctgaacccaggggtcttggaagtgctgacacagctaagacctccctggaggcttgtctgttcatccagaatggccactctggattcctataaaggctcctgtctctctgaatcctccctgtatggagaggctatggattagataaacttcagagtgtttagtaataaaaacaagcttgatctcaactctgtggccctgtcaatacccatacctgcaccctcttgaaaagctacatcagtgtagcttctaggcttgtaatctgaatgatcagtgtcttttggctcaaaaatgcaaagtgaaggaatattcagaggaaattagagagctgcctaagtggctctatcctacctggcctccgtttctcattatggctttgctaaagggtctgaaccgtggcatggacgtacattttttctcagtaacgccacatgtgtagagtattgatgcttacccaagcaaagcaaaacaagcaattaggaaatacagtctctctctcattttaccgattaattattcataattttattgataataagaactttatttttctatcattgttattattattattattattattattatttcaccactgattagtgaaaattattggtcctggactatcaccagtccctgttctggcatttgggaacaactggtgcgtgtaagccctgaaactctccttcgtgctggcattctgtgaacctgagagagatgagaagagaaccagggactagagtgaagcctactgcagttgtcttggcatgaggctgtgtggcttggctttggctgggagtcacagacaagcccacggacctgagaaagagagtgaatcactgtacaagtatttatcgagcacctcccatgtcctgggaagcagtagctggagagtggtgaaggagtactgagttttggggttcaagtggccagggctttcccccaggctttttacctattatctgcattatctgggcaattcagttcacttatgggccttagttttctgtctaaaaaattgtgttgatatactattatgtatcagaaggtatttgataaattgcagaatgctggtggtattgatagattttcagatgatagtgacagaaaaagttgattgttggaaagaaaattagtgaggtctatttttcatatacttacctttagaggcaggtaagaaatctaagagtgaagggaaatggaattcacattgtttgaagggtaggaaattttaaaaatagtgctttttaatcgtccggaagacttggggagagggtattattcctgtttgagtgggtgggaacagtctgagagacacttacctcatgcagctactgagtgggtagagctggggcccagctcagatctaactccagcctgtgctgtttctacagcagctcagaaaccaaagttcaggggagcagaggagctggagacagtgaatccatcctgaggcccccctgagtaaatgcttccagggcaattccacttgcactattattaataccttacagggtgtccttcacaaatttctcagaatgatggctgtaaaaatgggtgtgtgttttagaaataaaaatattgtggtgctaacaagttcctgccggagttgttcaaggacgttcattcattcagcaaatatttattgaaaatttgttttgttccagacactttgttaaatattgggaatatagcagtaaggaaaacagagtcactattcccaggatgctcatattctagaaaggagataagagataaagtcacagtacagcattagtgcagtgggaacttgggttactctagaaatacagcccagttaggatcgaggggctcggggaggtaatatgtaggttgtgggccagtggatgaattggaattgggtaataagcagttgaggtgaggcagtttgtaaaagctagtctggtggcagtctgaggaaatgagacctccgtggggctgcaaatgcagtatagtgagagcttagactgcaagaagctctgtgaatccgtcaaaagttcctttaagtcccttttatatattccatgctattaattacaggattctttgcaggggtgaagggggacctcatgggatggagccagttcaccctagccacaatcagagaaaggtcagaagctatttgtgacatttttcccgactcttctatctcaaagacctggacctgagaactccggagaagatgagctttgagcactcacgtcctcactgggcagacagagcagctctcctcatttcagttgtctcaagactagacagtgtgcctgagaataaagcagtgaattaaccccacttgtccaagagggtgggactgaatactagacagggccctttccgcctctcttgggtggtggggggtggcgtgtgactcagaggcagtgacatcagccatgacttcattcatccacaggaaagacagtgtgcagaccgcgaacacggctgatttctgccctcccttctcgatgctttgtcttgctggggacattgtcatggtcctgctgttatttcccacacattttattcacgtctcatgtttaagctgttctttttcttcaccccattctttttggtctctttgttcatcttttgcttttgtctttattttcttctttctcctatttaatttttcttgtttcattttctttcctgtacttcttctcttttgtctccattttccattctttccatttgctctgtcctttctcttccctctgtgtcagaaatgtatacaggaacacatcctcctgcctcctatttcttctctcctctgggcttcccactaggttattgctgtcctaacattcctaaaactgtgttcacaaaacactctccacacaaggactgatggtggctcccattcttttctgactcaagtatctaatacaagtccagatttacctcttactgcatctcaacacaggtctctcagactgagcttctcatagttccttctccatggccatggatgctgctgatgcttctgcctgcacttttactcaggccattgcctcagtgtggactgacctccatcccatcttcctcagtctttgccttccctctagacacatatctgacattgcctcctaagtaacccccttacttacctccttcccacagcactgtctccttcatgatcatacagaatccatagtttataaattatgtattttagaacttgaattattctgtactatttatacattcttcctgcatgtttcatatgcatagattctttgttccacctagccagtaactaacctgaggataggaagtatattcctgcctttcatcttctatgagcatacctagcacatagttggccacaaaccaggactgacagaccatttttttgcaaagtcaagaaatattttacttgaaaaatagttatttgatgctaattctggggagatagatgaatgaattatagttctttcctaaaaaaagagctaagggtctagtagaagagacagacccacacgtaatttgagaagaacaaggattgtggaggaaactaatgtttactaggagtgtacaagaatgggcacatgaacatgtataatctcactgaattgaattcggctaacaatcctatgagttaaatgttgctaccaatgaacaaagtgagactcatagacattaggtgactactagtcagaaataacaccactaataagtaggagaaccaacatttggactaaggtttgtccgactctaaagcccctactctttcctgaagagggaaggatgtagtgaaagtgacattctaagtaataataagaacaatcgtaggtaaaaagtgcttactatgtgccaggtgctgtaaacagattacctatatttgttcatttgatcccccatcaaccctatggcataggcactattattgtcctcagtaatttttataggatgaggaaattgagatgaagagtagttgagtagattgctcaaggccacatagctacagagtactagagccaggatattcactcttgcattctggctctggagaagaggcagcagaatgtagtgaggccctctacatagagtagcatattgcatgatcagaactgctgttggaccagtctgtttggagaatcagggactgtggagatgctgacaggtgaaggtgttgagaggtgaggctaaagaggcagccaggaatcatcacaaaggaccagtgccctcctcaaggacccgtgacaaaacatgcaattttcctagaaatattttctgtgaggttggaccgttagggatccatcataaggaagagtttaagttgtggtcttattctactacttgagttgtgaaggaacttttgagttgtggcctttgtccatgcccagcgggaaatcacagtggaactctgcaacagtggtgtaaatgaacaagtaaggatgcacatacccaaatagactccaaagaaatgccagttgaaacagtaaagtacgcctgtcctttacgggttggagatgattaagtttgggttgaaggacatttgggaagaaagaagaagggacatctgtgtgagccagcttggaacagatgccaggttatcctcaggtgtcccagagcgctcaacatttgatggagcactctccccactgcagcccccctctccattggtacttggcagcaattcagtggtgctgcactgacctgggagtccaagccaggaagtgaatgaatccattttccaattaaaatgaaacttctccaaaggacctgctaaccctgagagaagaaatttatcttcctggcagtctggcttgcctagaatatgtctctgctcctgaaacagactgagaaaagccattagcttgaatgaaaaaagagaaactgggacagttcttattcacaacctcattcatttatccattcattccttttatttctgcagactttaatttggcttccacatgtctgctcattcattcatttattcattcattagctaacatgactcatcatctatagatcagacaaactgctgtgtcctaggagtagagatatttaataaaaaacatagctcttgcctttgaggagctttcagtctagtgagagagacagacaaatgaacagatgatgggaaatgcagtgatagggatattcatagagtactataggggcatagcataagagcatctgactcagcatagggatgtcatgggtgatttcatggagtaggaaacaccagagttgagtcctaaatgtgtacacacatagacatatacatgctattgcttctgtttctctgaagaactctaatacagggtgatgaggtgggcacctcttcatgaattaattgggagttgaaattagaatggtggttgaatgtaaggaatgagagaagaggtagaagatgactcctttggtagaggtagaagatgactcctttggtaactggatcaactggcactggaaatcaaggaggaggaacacacttgggggaagatagcagattctgtcttggacgtgttgagttggaggtacagtgggacatccaggagacatgtctcagaggagagtttgaattggagtttcagatttggcacgttattcagcgtgtagttggttggaatcacaggagtgattgatatttctcagagagcatgggaacagtgaaaagaacatttggatgaggtaagatccctggggagcagctaaagaaaagagcagctaaagaaaaggagcccatgaaggagacagaaaagcactgatgagaagggcgtgagaaggtcccggagagtgagaggttgaggaagacttcctcatttctcccctggtcccagtctttgactttctttcatgtctgctccaagacctgttcaccctttccaaagccttctcttcctattaggactgtctccctctctcccatagatggtaccacccacaaggcatggcttgatccaggtcactgtggcatctctctcatctcctccagtaagaaatgcacttctgcattatattatgttttagagaggcagatgactgaactcaaacattgggctgggcattagcgatgcaaaatttggtctgactttccatttacccgttgtgtgggacctggggatagtcttggtcccttcctgggctttaggttcataatctgcaagcatagttttctgactccttgccttgcctgccttgaagaattatacaggtcagatgagatcatgcatgtcaaagtgctttgaaaactgtgaaactctgtagcagaagagtgaatcttgttgacttatcaggcactttatattatttcatttaattctcacagcatccttgggggaagatgctaggaatgtggctttgaggaaactggggcttaaagaaattaatttacctaaagctacacagctgttaagtggtgaggacggcaatcaaaatcaggtatgccagactccagagttcttagaccccatctacttcagccttgttttcctaatacgtacagtggtgtcacactcctgggtaaagtcagctttgctgagtatgatgagttttcattaaaatgatagcatattttatggttgggaaatcaactctagtgtggattataagtttttcttttcgtacaagaagagcaaagcccttcagggggaggaaagtaggggaaagggatgcatataaatccagtttttgaaaattaaataaactatacagtggaattatttcattttacaaataaattctatgatgttaccgttaaacaagtcctcatctaatgggggtaatgcgtcttgtctattcaggtttttgtttcttgggtctttctcggcagtgacataaatatttattccacttgatgtttaggcctctgcttgcatctctccccggaagcctttagaaaagcctttagaaaagcctccccaggtcccaaaccctttccccgctctgagccctgtctgtgattactcattagaggcagatatatggccacacacaaaatattacaataatgttatgaggctgactcatcaaaccttggtatcaggcttattacgttattgtcatatatcatcttattaattatctcttcctttgtgtacatctttctctcgaaaggacctggctttagattttcttatatctcccaaaactctgcattttttttttcatgagttagacttggctcttgcccttcagaagtttgtcatttcaaggtagatttaggtatatcaatgaataattagggtacagcatgggatggagaggttcacagaaaaggtgacatctgagctggatttgaatcaagggcagaggtttgataaagggagaagatgggaaagtcaattcaagtagagataccagctgtaacagaggactggaaatatgaaagtgtaatgcatttgggaaagtaaaagaggtgagaaccaaatggagggtgttaggagatgagcccagaaagtcatcatcataatgatcacagccaagttggagccaggttaagagtcctgagagccagactacagagttaaaatgggattctaggccatgaggagatgtcgcaccatctttaataaaggaatggaatgggaagctttatgtttttagaaagatgcctctagtagtgcagacctctcagcttatctgcctatctgacttgaaatatttctgatgttctgtctctgtgcatgggagtttgaaacacacaattattttattcattctgagaagtttctggctgaggtttatgacctactccatgcttccagcgtcatatttcttttaagaatgacattgaagattacgtctcttcctgaaactcttttctctctgggctattggcctgtgccctaatttggagtcttgaacatagagtgaggataaggtctagctctttcttgggtagttgtgctggaaaacaacagcatgagtacttggaatgtacaggcagtactatttattgagtggggaattagggagctgttccctcccttttgtttactgctcacagcagataacccagatagaatccctttgcaattacacagtagattacttggataatcctttgtaactggtcatgcctatcttctcatgttgcccctcgaccctggtgtcactgcagtagctgcctcatttccctcacgagttccctaggtgtctagaagcagcagaaacctcacagcttccctggagtgggagggaaagggtgaaagctacttctctctgtcctgaggctggcagggcggctgcagccttgaatcttggacatactgccctacctccgccctctgcttagacccacagctgtgtgagctttgagtagtagcctcctcccaacaaatgctgtggtttgatgaagtaataattttttcttttttttaaaaaaagctgttctctttggttgctttaagctgagggattgcttaactcaaaggattgttgttggaatgcagaaggcttttgtgccaagtcatataacccaaatcacttttctttttttcttgaaaagactagtttttgttagttgcctggtaactggaggatagaaagacttaactcattcagcacagagagctcctagtttgaactctattaggccatcacctaatgagatacatctgaaattggtgtgtgtcgagggcctgctccttgcactctctaatccgtgcaacattgtgcatgggagatgataagtacataggagttacatgagctgtccaggattgaaattgtacggaaatgtgcttagaagggcttttgtttgtcttttcttctgtaaagagtggcaatagcttccattatgacatttccaaaaggcccaaaatcacacctctgattggactgggaggttcagggtggtaactgtggcatagtggaaggaaagaacatttactttagagctggaagccctgtgactttgggctaagcccttgtggtctgacccccagttccttaatgtgtgagtattgtgtattacctacacgcctctgcatcactctgtagattaaatgagaacactgttgtaaactgtggaggacttagaggacgatcactgtgtcctaatgcaggcccagtggttacaagtagagaattaattcagtaagattgaggcctttggctgggattgtatgggccagagaggaggagggacagagagatttttctgcagaactagactaaaaatccatctatgggggtaatgtgctgttggccaatatggcatttgatgacaaagcacttgtgaatcaggtagcctaatataaaaaactgcatgtggctgggcatggtggctcacgcctgtaataccagcactttgggaggccgaagtgggtggatcacaaggtcaggagttcacgaccagcctggccaacatagtgaagccctgtctcggggaggagccaagatggctgaacaggaacagctccggtctacagctcccagtgtgagcaacgcagaagacgggtgatttctgcatttccatctgaggtactaggttcatctcactagggagtgccagacagtgggcgcaggtcagtgggtgcagcgcactgtgcgcaagccgaagcagggcgaggcattgcctcactcggaaagcgcaaggggtcagggagttccctttcctagtcaaagaaaggggtgacagacggcacctggaaaatcgggtcactcccacccgatactgcgcttttccgacgggcttaaaaaacggcgcaccaggagattatatcctgcacatggctcggagggtcgtacgcccacggagtctcgctgattgctagcacagcagtctgagatcaaactgcaaggcggcagcgaggctgggggaggagcgcccgccattgcccaggcttgcttaggtaaacagagcagcctggaagctcaactgggtggagcccaccacagctcaaggaggcctgcctgcctctgtaggctccacctctgggggcagggcacagacaaacaaaaagacagcagtaacctctgcagacttaaatgtccctctctgacagctttgaagagagcagtggttctcccagcacgcagctggagatctgagaaggggcagactgcctcctcaagtgggtccctgacccctgacccccgagcagcctaactgggaggcaccccccagtaggggcagactgacacctcacacggccggatactcctctgagacaaaactcccagaagaatgatcagacagcagcattcacggttcacgaaaaacgactgttctgcagacaccgctgctgatacccaggcaaacagggtctggagtggacgtctagcaaactccaacagacctgcagctgagggtcctgtctgttagaaggaaaactaacaaacagaaaggacatccacaccaaaaacccatctgtatatcaccatcatcaaagaccaaaagtagataaaaccacaaagatggggaaaaaacagagcagaaaaactggaaactctaaaaagcagagcccctctcctcctccaaaggatcgcagttcctcaccagcaatggaacaaagctggatggagaatgactttgacgagttgagagaagaaggcttcagaagatgaaactactccgagctactggaggaaattcaaaccaaaggcaaagaagttaaaaactttgaaaaaaatctagatgaatgtataactagaataaccaatacagagaagtgcttaaaggagctgatggagctgaaagccaaggctcgagaaccacgtgaagaatgcagaagcctcaggagacgatgcgatcacctggaagaaagcgatggaagatgaaatgaatgaaatgaagcgagaagggaagtttagagaaaaaagaataaaaagaaacaaacaaagcctccaagaaatatgggactatgtggaaagaccaaatctacgtctgattggtgtacctgaaagtgacggggagaatggaaccaaactgaaaaacactctgcaggatattatccaggagaacttccccaatctagcaaggcaggccaacattcagattcaggaaatacagagaacgccacaaagatactcctcgagaagagcaactccaagacacataattgtcagattcaccaaagttgaaatgaaggaaaaaatgttaagggcagccagagagaaaggtcaggttacccacaaagggaagcccatcagactaacagcggatctcttggcagaaactctacaagccagaagagagtgggggccaatattcaacattcttaaagaaaagaattttcaacccagaatttcatatccagccaaattaagcttcataagtgaaggagaaataaaatactttacagacaagcaaatgctgagagattttgtcaccaccaggtcggacctaaaatagctcctgaaggaagcactaaacatggaaaggcacaactggtaccagccactgcaaaatcatggcaaaatgtaaagaccatcgagactaggaagaaactgcatcaactaacgagcaaaatcaccagctaacatcataatgacaggatcaaattcacacataacaatattaactttaaatgtaaatggactaagtgctccaattaaaagacacagactggcaagttggataaagagtcaagacccatcagtgtgttgtattcaggaaacccatctcacatgcagagacacacataggctcaaaataacaggatggaggaagatctaccaagcaaatggaaaacaaaaaaaggcaggggttgcaatcctagtctctgataaaacagactttaaaccaacaaagatcaaaagagacaaagaaggccattacataatggtaaagggatcaattcaacaggaagagctaactctcctaaatatatatgcacccaatacaggaacacccagattcataaagcaagtccttagagaactacaaagagacttagactcccacacattaataatgggagactttaacaccccactgtcaacattagacagatcaacgagacagaaagtcaacaaggatacccaggaattgaactcagctctgcaacaagcagacctaatagacatccacagaactctccaccccaaatcaacagaatatacattttttttcagcaccgcaccacacctattccaaaattgaccacatggttggaagtaaggctctcctcagcaaatgtaaaagaacagaaattataacaaactgtctctcagaccacagtgcaatcaaactagaactcaggattaagaaactcactcaaaactgctcaactacatggaaactgaacaacctgctcctgaatgactactgggtacataacgaaatgaaggcagaaataaagatgttctttgaaaccaatgagaacacagacacaacataccagaatctctgggacacgttcaaagcagtgtgtagagggaaatttatagcactaaatgcccacaagagaaagcaggaaagatccaaaattgacaccctaacatcacaattaaaagaactagaaaagcaagagcaaacacattcaaaagctagcagaaggcgagaaataactaagatcagagcagaactgaaggcgataaatcgagacacaaaaaacccttcaaaaagttaatgaatccaggagctggttttttgaaaggatcaacaaaattgatagaccgttagcaagactaataaagaaaaaaagaagaatcaaatagacgcaattaaaaatgataaagggaatatcaccaccgatcccacagaaatacaaactaccatcagagaatactacaaacacctctacgcaaataaactagaaaatctagaagaaatggataaattacttgacacatacactctcccaagactaaaccaggaagaagttgaatctctgaatagactaataacaggctctgaaattgtggcaataattaatagcttaccaaccaaaaagagtccaggaccagatggattcacagccgaattctaccagaggtacaaggaggagctggtaccattccttctgaaactattccaatcaatagaaaaagagggaatcctccctaactcattttatgaggccagtatcatcctgataccaaagcctggcagagacacaattaaaaaagagaattttagaccaatatccttgatgaacattgatgcaaaaatcctcaataaaatactggcaaactgaatccagcaccacatcaaaaagcttatccaccatgatcaagtggccgtcatccctgggatgtaaggctggtccaatatacgcaaatcaataaatgtaatccagcatataaacagaaccaaagacaaaaaccacatgattatctcaatagatgcagaaaaggcctttgacaaaattcaacaacccttcatgctaaaaactctcaataaattaggtattgatgggacatatctcaaaataataagagctatctatgacaaacccacagctaatatcacactgaatgggcaaaaactggaagcattccatttgaaaactggcacaagacagggatgccctctctcaccactcccattcaacatagtgttggaagttctggccagggcaattaggcaggagaaggaaagaatgggtattcaattaggaaaagaggaagtcaaattgtccctgtttgcagacgacatgattgtgtatctagaaaaccccattgtctcagcccaaaatccccttaagctgataagcaacttcagcaaagtctcaggatacaaaatcaatgtacaaaaatcacaagcattcttatacaccaataacagacaaacagccaaatcatgagtgaactcccattcacaattgcttcaaagagaataaaatacctaggaatccagcttacaagggacatgaaggacctcttcaaggagaactacaaaccactgctcaaggaaattaaagaggatataaacaaatggaagaacattccatgctcatggataggaagaatcaatatcgtgaaaatggccatactgcccaaggtaatttatagattcagtgccatccccatcaagctaccaatgactttcttcacagaattggaaaaaactactttaaagttcatatggaaccaaaaaagagcccgcatccccaagtcaatcctaagccaaaagaacaaagctggaggcatcacgctacctgacttcaaactatactacaagtctacagtaaccaaaacagcatggtactggtaccaaaacagagatatagatcaatggaacagaacagagccctcagaaataacgccgcatatctacaactatctgatctttgacaaacctgagaaaaacaagcaatggggaaaggattccctatttaataaatggtgctgggaaaactggctagccaggagaaagctgaaactggatcccttccttacaccctatacaaaaattaattcaagatggattaaagacttaaacgttagacctaaaaccataaaaaccctagaagaaacccaggcaataccattcaggacataggcatgggcaaggacttcatgtctaaaacaccaaaagcaatggcaacaaaagccagaattgacaaatgggatctcattaaactaaagagcttctgcacagcaaaagaaactaccatcagagtgaacaggcaacccacaaaatggcagaaaattttcacaacctactcatctgacaaagggctaatatccagaatctacaatgaactcaaacaaatttacaagaaaaaaacaagcaaccccatcaaaaagtgggtgcaggacatgaacagacacttctcaaaagaagacatttatgcagccagaaaccacatgaaaaaatgctcaccatcactggccatcagagaaatgcaaatcaaaaccacaatgagatatcatctcacaccagttagaatggtgatctttaaaaagtcaggaaacaacaggtgctggagaggatgtggagaaataggaacacttttacactgttgttgggactgtaaactagttgaaccattgtggaagtcagtgtggcgattcctcagggatctagaactagaaataccatttgacccagccatcccattactgggtatatacccaaaggactataaatcatgctgctataaagacacatgcacacgtatgtttattgcggcactgttcacaataggaaagacttggaaccaacccaaatgtccaacaatgatagactggattaagaaaatgtggcacatatacaccatggaatactatgcagccataaaaatgttgagttcacatcatgtcctttgtaggggcatggatgaaattggaaatcatcattctcagtaaactatcgcaagaacaaaaaaccaaacaccgcatattctcactcataggtgggaattgaacaatgggaacacatggtcacaggaaggggaacatcacactctggggactgttgtggggtggggggaggggggaggggggagggatagcattgtgagatatacctaatgctagatgacgagttagtgggtgcagcgcaccagcatgtcacatgtatacacaggtaactaacctgcacattgtgcacatgtaccctaaaacttaaagtataataataataaaaaaaaatccacctagttttcatcaaaaaaaaaaaaaatggcagggtgtggtggcatgcacctgtgttcccagctactcgggaggctgaggcaggagaatctcttgaacccggggtgcagaggttgcagtgagctgagatcgcaccactacactccagcctggcgatagagtgagactccatctcaaaaaagaaaaaaaaaaaaaaaaaagaaacaaacaaaaaaaaactgcatgggatcctcacagatgcctgctggcatctcaaggtaagggatcaggcttctggagacatttcctctcattcagtccttattcctctttgctggcctatctccagacttttcttttgtagagaaagcagggaatattgctatcttcccttctgagaccatgtgcatacttaagagtacctcagacttcccacaacatgttatttctagttgctcatcccacaaatatttgttgaattactagacaaactgctcagcttcatcttccagttcctgttatgtgaggagtacttcagaggttatagagggcttccacatgtgttatctccttagagaggagaggttggactgggatctccagctttgattggtgacggttagtgtggtctcaaaaagaaagaacgcagggactccttgctcctcctattcccagtgtctctttttggcaaaaggcttgagttctttgtgacattctacttgggttctgttgtcccacagtggctggctgtgtggctacaggctaaaagctgtcgttatataatgtctttaatgaccacacacaagatctaaagtagtttttttttttttttttttttgcctgaatttaagaagattgttgtgctttggcttgaagcactggttgttgctgcggtggtttggcggttcatatctggtcactggcctttgatttctggaacctttagaaagaggctgccttttctcctctccctgaccactgattgctgaaaccacaagacatatggaaatagatttcagggactagccaaaagccattctggtagtttgattcacatcgtctcaaaggctaccattttctgactgtggcttgttagatcctatacagagatactactagttcttagctgtgttaggaatatttagtatctttaagttttgcttgatttaacattaacatcttagaatgggcgttcaaagagaagtttagggcaggtccctttctagacacaagctttcacctagatgtttaggaagttaaaacaacaacagtaacagagaatcagcttgatactttgccttttagatctgaactcttttgatattgttttgatagggccagcacttgggatagtaccgtttatctgctgtaaatagatgttggtgtttatatagtagtgttagggaagcactatgtaggaggaactcacagaattctgataaaggccagttgtatataaaatagatataataatacccaggacttttgtgttgctctaaggagataacacatgtggaagccctttataaactgaagcacccctcacataagaggaattggaaggtgaagctgagcagtttgtctagtaattcaacaaatatttattgagttcctactgtgtgttaccctgcggcaggtactgaaatatgcctcttttggaacttctgcattgttgcctttaggttcccagagatactcctatgcttataattccttttatagctttttggagagggagtaatagaaaccaggacatggaaagttatctggatggtaggaaacctttcttgctagttcctctgtcttctttactattctgtttttgaaattctacctcttcaggtgtttgacagaaaatggccacttcatgcttttcaagtttatctcacctccagttccattcataggcagaagtgaaatggttccatttgggtcctgattctaagttcttgggagaagaaatctggttggtacaactaggtcacatgcctaaacctggtccaaccaagtgcttgtagtaaggggatgagagttaagtagtttctgcttggcagctgagggtcctctcagttggggtggagaagaggagacaatcatccaatgtcatggtgaacatgactgacaagatccttgacctcacagagcttatagtcagtctgtcaggaaagaaagacttttgtattagtctggtcttacactgctaataaaaacatacccgagactgggtaatttataaaggaaagagatttaattgactcacagttcagcatggctggggaggcctcaggaaacttacaatcatggtggaaggagaagcaaacacatccttctgtatttggtggcaggagagagaagtgcagagtgaaagcaggggaagccccttataaaaccatgagatcttgtgagaactcactcgctatcatgagaacagcatggaggtaaccactcccatgattcaattacctcctacagggtacctcctatgacacttggggattatgggaactacgattcaagatgagatttgagtgaagacacagccaaaccatatcaacattacacaaatgattgtgggggtggtatgggttgtatgacaactagacctaaactaacaatatgacttaccggctttgatttccaggagatcctggaaaccccctcaaggaatggtggtgtgtagggttaaccaaatgaggaaggggatgatgttgatcctgggagggcacagggtggtgggtgaggaatgaatgttttaggcagaagtggcaaagtaaagaaaatgcccagcagtaagaaaaagcctggccattttgcaatacagagaaccaaatctttaaaatgtacaatggcttgcttatgtggccattctctttgacttagactggaagttctttgagggcagggactatcatcttttttctattgcctttgtaaccagttggcatgtggagaattttatatggcaggggacatttagtttcattgggcagtttctgagtacagcttctttccagcttatatctgctctgaaatcttatatgtccatcaccattcactgggaaaatggattgcataccttacagactgtgcttttgatatggtttggctgtgtccccacccaaatttcatcttcaattgtagctcccataattctctcatgttgtgggagggacctggtgggagataattgaatcatgagggcagttttccccatgctgttctcgtggtagtgagtaagtctcacaagatctgatggttttataagaggttttccctttctctgggctctcatttctctctgtggtctgctgccacgattgtgaggcctccccagccacgcgaaactgtgagtccattaaacctatttttctttaaaattacccagtctcgggtatgtctttatcagcagtgtgaaaatggactaacacagctttctatccttccaggttggcaaagagggttttaagggaaattacgatcatttttggaaggatcaagcattgtcagtttttctttcctgtataagtactgcttttatattattcctacccccaccaagctcctgaacagatgtttcaatgggcattgttggctatgcttttgttttgaaaaatttgaaacattattgaaagaggagatggtagaaaaaccccctaattgattctaatatatatttaatttggcagaacttgagagagatttgctgggataaggcgggacatttctttgatctcccggacttcttatcgtggaaggcaacaggtgtcacagcacggtatgttaattacaagttggattgtgtttgcgttcttccattcttggatgtctgtctatatattgctttcttaactctctttgactggatatacttttggtacatctgcatgtgattttgcatacatgaaacatcttgaatctatcttcgacctccactgcacatgcccaaacactgttgttcctaagagccctggaatgtgagtatccaaggtgaagaccattcattaaaattggtcatatttgaaggagatatgaaaaatccagagtgaaatgtggatttttccaaaggcactttttacatgatgaataaaaggaaaaaataaacacacacacacacacacacacacacacacagagtcacgcattccttaaggacagggatacattcagagaatgtgttgttaggcaatttcattattgttgcaaacatcatagagtatactttcacaaatctagatagtgtattctactacatacctaggctgtatggtatagcctattgctgcttggctacaaacctgtagagcatgttactgtactgaatactgtaggccattgtgcacagtggtacttatttgtatatctaaacatagaaaagatatcataaaaatacaatgtaaaagataaaaagtagtatactcatatagggcacttacaatgaatgaaacttgcaggactagaagtttctctgggtgagtcagtgagtgagtggtgattgaatgcagaggcctaggatattactgtacacttctatagactttataaacactgtacctgtaagctacactaaatttattttaaaaatttgtttaataattatcctttgcttactgtaacattttttacttcataaacttttaaactttttgacttttttgtaataacacttatcttaaaacacaaacacattatacagctgtacaaaaatattttctttgtattcttattcaatatgcttttttctttttttttcattatactttaagttctagggtacatgtgcacaacctgcaggtttgttaattatgtatacatgtgccatgttggtgtgctgcacccattaactcgtcatttacatgaggtatatctcctaatgctatcccccgcctccccaccccacaacaggccccagtgtgtgatgttccccttcctgtgtccatgtgttctcattgttcaattcccacctatgagtgagaacatgcagtgtctggttttttgtccttgcgatagattgctgagaatgatggtttccagcttcatccgtgtccctccaaaggacatgaactcatcctttcttatggctgcatagtattccatggtgtatatgtgccacattttcttaatccagtctatcattcatggacatttgggttgattccaagtctttgctattgtgaatagtgccacaataaacatacatgtgcatgtgtctttatagcagcatgatttataatcctttgggtatatacccagtaatggaatggctgggtcaaatggtatttctagttctagatccctgaggaatcgccacactgacttccacaatggttgaactagtttacagtcccaccaacagtgtaaaagtgttcccatttctccacatcctctccggcacctgttgtttcctgactttttaaagatcgccatcctaactggtgtgagatgatatctcattgtggttttgatttgcatttctctgatggccagtgatgatgagcattttttcatgtgtcttctggctgcataaatgtcttcttttgagaagtgtctgttcatatcctttgccccctttttgatggggttgtgtttttcttgtaaatttgtttgagttctttgtagattctggatattagtcctttgtcagatgagtagattgcaaaaattttctcccattctgtaagttgcctgttcactctgatggtagtttcttttgctgtccagaagctctttagtttaatgagatcccatttgtcaattttggcttttgttgccattgcttttggtgttttagacatgaagtccttgcccatgcctatgtcctgaatggtattgcctggctttcttctagggtttttatggttttagttctaacatgtaagtctttaatccatcttgaattaatttttgtatagggtgtaaggaaggaatccagtttcagctttctccatatggctagccagttttcccagcaccatttattaaatagggaatcctttccccatttcttgtttttctcaggtttgtcaaagatcagatggttgtagatatgtggcattatttctgagggctctgttcttttccattggtctatatctctgttttggtaccagtaccatgctgttttggttactgtagccttgtaatatagtttgaagtcaggtaacgtgatgcctccagctttgttcttttggcttaggattgtcttggcaatgtgggctcgttttcggttccatgtgaactttaaagtagtttttttccaattctgtgaagaaagtcattggtagcttgatggggatggcattgaatctataaattaccttgggcggtatggccattttcacaatattgattcaataagcttttttctattaacttttttttcactttttaaacttttctgttaaaagctgagatacaaacatacacattatccaaggcctacacagggtcaggatcatcaagatgtcactaggtgataggaatttttcagctccattaatatcttatgggaccactgtcatatatgcagtctgttattgactggaatgtcattgtgtgatgtataactcgtgtgtgtgtgtgtgtgtgtgtgtgtgtgtgtgtgtgtgtgtatattttggcctctaatattaactaggagatacatttttcaaggaagctgattcagctggatggatgtgttatgtacttgtttgctttttatgtaaatgtacctcagttatcccatactgtagaagtatatatgttgaagtcaacaactatttttcagtaagttatgaatgttaaaaatagagcatatgctacacaatagagacttgtataaaatactcattgagtgtgaaattgtggctactataattaacagagtgagtgtatgtgtggggttacatagacaggttggacatgaaatctttaagtatgacgagcctcttgtcatgatgacctcagatttaaggagatgcctaaggtcaaggcaggtcttctcatcttgaaaaagatttagaatctgggttgaacaaacctgtgaagaagggaatcatttcccagaggatagataaacctctagtaattagggaggcaggtattgtatcttaaaatcagcttattcagagaggggtcagatcttaccctctttccttcttgtttgaattcaagggaagcgggaaatagcagtaccatttctcctatctcattcttttttgtagtgagttgatagggtgtgataattcagcagcgggggcttccagcagggagacagcagagaacatttcagaagcatgtcattcttaatgtcagcaaccccgaacctccttgcggtgaaacaatcattagccaaaggtcctggggcagagagatgcatatgcttgtgaaaatggcctctgcaaacctcaggtacatgccatctctggcaggaggtccctggaggagtgttctcaactttaccctggaaggtgtaattagtcaccattatggttatcatcagtggggagggcagtgtgtaggtgaggatatcatcttgggcattcctcttttggtgtgatgttaattgttcaaagttatttctgagagaatctttctctaggttttttcatcattgtacatccgtgaaagaaatgttttgatcattttggccaaatggtcttgtttgttagtcaagcagtgctagttgtcatgtgtatgggcaataccccattggcctgcaaatccagaggactcaaagctggaacaagagatggaggagaacgtggctttccttctctttttctttgacattttactcagcactttgactgcctccctgattctttctgatggctctgggtattctgtgtcccatttcctggtttccggtgccatattcaggcaccaaggagagggctttttgaagttagctgtggctcagataaagtgtggtggcatgcatacacacggtggactaacaatatgacttaccggctttgattttgccacactagttgtgtgaccttgggcaagtctcttcccttctttgattgtcactctttttgtctatagcatggagattgttatacctattttgcaaagttcttgtgagaatcctattaaagcaatttttccaaattagttggagtataggaattacctgaatgatttgttcaaaacatgtatccccaggtcttctagttttcagcctaatgaatcagaatctccatgggagatgtgggaatttgtatgttaacaagtgcctaggtagtatatgatcaggtaactttggacaacactgcctaacagaatatacatgaaggtaggatgtgacactgagtgagagattggaagtgttttaaaggcctaatgaattttttgaatttaaaagttgtaaacaaaaaataaaattctaaggccccccgccatctgaatggaccccttctcttggccaaaggcattccaaatttaacctgaaaaaccagttcaggccatgatgggaagggtgtgggtaagacattcccccttatacagtcctcccttttggaattcaggacaagccaaccaatactaacatcaacaaaccttaagtctcataagaaatgtttacagtctattctctctgaagcctgctaagtggaggcttcatctgcatattaaaaccttggtctccacaactccttatcctaacccagacattcttttctattgataataacactttcaaccaattgtcaatcagaaaatttttaaatctacctacgatctggaagcccctgctttgagttttctcacccatccggatcaaatcagtattaaccttacatgtattgattgatgtctcgtgtctccctaaaatgtatagaagcaagctgtgccccgaccaccttgagcacttgccatcaggacctcttgaggctgtgtcacgggtgcgtccttaaccttgggaaaataaactttctaaattgattgagatttgtctcagatacttttgggttcacaaagtggagggcgtcttgttaacttatcagaacatgcttgggggcttctagccttgcctttgacaatctcaaaccttgaggaagcagaaagtttaatgctcagaaatgatttattggctgtctaatcatccctgccatttttattggctgtgacactcatgactcattctattttcattagtataaattaatcatcccgttcccccacccaccccgtacttgtgagcaccttcagagacctcccttcccatttccctctcttccagagagcaaagcctgtggaccttgggtaccaggttcctcttgcaaaggtggttgccctttcccttggcccacttacagcttgcatctgtgtttctctctcttatttactcaatatttctgccttctctatttctacttgcatatcaaggtgaaacaaggaacccctctgagcttccttgattgtagatggaaataatgacaacacctgctccatggggttattgtagagaaagcttctaacacaatgctgagaaagctttttaaaggtattagcgatttcatttagttccctttctctatcagttttggcaatgagtctttacattaagcatagaggaaagagggaaatccttgtggtcagactgatctggtttcagtgtctccatcatgtgcagtctgtaagaacctggagcaaattatttacctccctgagccttatttcctcatccataagccctctcagggctattaaaacagttctctgggtaaaacctctgtttttacacaataaagggttcttttaataaaaaaaatccacattgtctgttctcttttctagagtaaggaagatgagggtctgaatttgaatatgccaattccaaaaaaactttgggtaataaaacaccaacttggcatcctctgggccaaggagagattgaaatttggtgtttatttggctcttacatgtgattattttgggaggctttggggaaaatgattgccaaaaaggctagagggtcttttttaaaaatacgttttagtagagtcaagactaacaagtgatcgaatttcaccctgtcttaaagctttcaaacttgtttttggcaatgacagtgtgtaagaacacctcctcccctttctctcttccttctccattttcctctcctctctttcaggttttgtttttgtttttttacccattctccccttttattgttctcatcctccgaaatatggcagctacttttctttatctgggtcactgagaaaatcaccatttggcccatgattagtttgtaattcagctccattctttttcttatattaatgaaaataattattgctatttttgttaataataataatggtaattatcacttattgagtgcctttcctttatctgtgctaggcatatttagcaaatgttaactctgttagtcctcatgaccatccttacagcaggtggtgtcattaccgctttgcaattcaagaactgaagcagaatgctttagtaatttgccacattcttgctattaagtgggttactgtctacaattttgatgacatgagaaatgggaagtcaaacatttgaatagtaggaattttttagtagtcagaaaaatatatgtataaattctccctctaaagagatttgaggtgactaataataataatataagaaaaagtcgtacaaaatagaaaaaaatcagaatggagtgaaaataatgataagataactgagctgaagctaagagctttagagaacctttagagaattcataattactaataactttgtttccaagcttcctagtggccaaagcaaagacagagcttaatcaagattaactgagtgaacagataaaaactttactgctgttcaagggaagtagaactttttctaacattgggagtctgagagaaattaatcctagatgatcaagggtagacaatataaattatttaaaagtatgtgctattaaatttagttataattttgaacaaaattttaattttaaaatagttttaggattatagaaaaattgtgaagacgctacagaattcccatatacttgatgtccagtttctcccattaatatattattatgatacatttgtcataattaatggactgatattgatatattatcattaataaaattccatactttattccgatttttttagtttttacctaatggcctttttaccatgttacatttagtcacgccttctcaggctcttcttggctgtgatagtttctgcgtctttctttctttttgatacccttgacagttttgaagtgtattggtcatgtatattgttggatgtccctccattgaaatttgtctgatgttttctcatggtgagacttgggtagtttgtttttcggaggaagaccatagagataaaatacctttctcaacctatcaagcgaacacactcttatcacaacttaacactattgatgttcaacttgatcacctggctgagatattgtcaggtttctccactctaaattactcttccaccccccaccccccaccatattgtactttttggaaggaagtcactatgcacagcccacacataaggagtggggagtagttatgcttcattttcttgagactgtagtatctacatatattactttgaattattctttatgggagatttgtcttgtctcagttcaccttttttatggctttgaactaaaataaattatttacaaggcttcttatgtacaaacaagagacactgtaagtaagtttggtttactggttaaatgttagaatttctgagacatttctgtggcatatgcgaaaacggttgaatttctataattttaggtttattatttcttatatttctttatattaaatttacatattctacttactcattttacttttcctctcccctccattataatgtataattctgtatgggttattagtaaatattctaccttttcctttaaagagatgaattcatggcttttagaaactgaagtctctttaaaataattattacgtttctgatgtgtgtggttctctgtgttttgggtttataagggatattattgtattgttattcatcttgtgggtttttaccagtctgtcaggagatgattatgttgggttattgatctgtagtcattttctaaatacaattcataggatctcaaatacaaaaccattatttagactcttattctactgatttttcttttgttaaaaaattggaaatatgctttgtacaacttatttttttacttaatatgttgtatttttcatattaatgtataaaaatatttttgacatctgtatagtatcctatcctatgtcagtatcaattttgtcaagggtttgggcttgaaatgggatcttattttaatttgcatttttgattattgaatgcaattaatttttcttatatttatcaaccacttatttatgtatgtcattgtcaattactaattatgacaattagtgttatatatttcaatgatgtttatgtcaattgctaatatttgtattgggagttcagtgttttcttcaattttggtgagaatttaaaaaaaaatttttttgcagtataatttccagaaaaatttaaacctacagaaaacttgagagaatggcatattgaacacccttataccttttacctacgttaatcagttgctaacattttattacttttgtgctctttagtgcacaccttacctacctctgacacacagacctgtaattattttgctgaaccatttgtaaataaattgcagacctcacagtattctccacctgatcagccaatactaacaacattttcctttataaccacaacatcattatcacacttaaggcaattaaaattaatcctcatactcccttacaggtatccctgctgttaaggattcagagggccactcactctttcttgctattggagttctgactgatagagactacattaaaacatattagctaaatgaggagtgaaaagttgtcttattatctcagaaaatactctttagcctctagtgtatagaacttctaatatactagatggataatacagctcagaagtgcagttaaaccccgtctgcatgttcaggtatgtgtacatacataggagttggggcaggaaggaagacccgatttgccaaccctatctcaagtctagcagcttagcaatatgaatccagacctgcttgggtatgattaccacatggcagtgggaagccatgctggtcacacttgggcataggaggtgaaagtgtgagctcattattatcaccttttctttaacacagtgacccttaaaatgtggcttaatctattccagtctcttaatgattacatgaatttcccttaccgtcttggagaaaattgagtaagaggatggggtgcaaagtcaactctgtgtctctggtgcttctctgagtggagagaggaggtcgggtggaagtctcattctccccagagagcagaggcagcagcaggagaagaagggagaaacttgcaccttaatacgtgcctgcctgtggtgactacagtccacatcccttccttggtacttggcctcttcatctcctgtctcattagtatatctgagataagagttgatttttttagaaaacatctttagatgtatatagtatacataattacatataattcacatactatatgattcactaatttaaagtatactattcaatgatttttgcagattacattacttatttttattaattttaataatacatatagcataaaatttgccattttaattatttttaggtatataattcagtgtcatgaattacattcctcatggtgtgcagtcattaccactatctatttctaaaacttatttatcaccccaaacggaagctgctactattaaataataactccccatttccctctttacctatcccctcttttttttagacagggtcttgctctgtcgcccaggccggagtgcagtgtcgtaattttggctcactgcaacctctgcctccagggttcaagcgattctcctgccttagcctactgagtagctgggactacaggtgtgtgccaccacacctgactaatttttgtatttttagtagagacagggtttcaccatattggttaggcaggtcttgaactcctgaccttgtgatccgcccacggctgagtgaacagataaaaactttactatttttatccctccctctcccctcttaaactctaatctactttatgtctgctatgaatttgcctattccagataccccatttaagtagacttatatagtatttatccttttgcgtctggcatatttcacttaacataatgttttcaaggtgtgtctatgctggagcatgtgtcagcctttcttttttatgactgaataatcacatcctattgtgtgcatatactacattttgcttgtccattcatcttgtccaaatggacctgttggtggacatttgcatcgtttctaccttttggctattgtcaatgatgctgtggcgaacattggtatataagtatctttgggtctctgcttttagttctttttggtgtatatctaaggagtgaaattactggttccatagggtcattctaagtttagcttggtgaggaaccaccagatgtttccactatggctgctccattttacattcccaccagaaatatatgaaagttctaattcctccacatcctccccagctcttatttccctctcctttaaaaaaattatacccattgtagtagatataaagtagtctcttattgtggtttaagaattgattttttaaaatactagaaatctgtgggatgaaagtaaaattgattgaatttatatcatcctagaagtaactttttttggcaaggataccccagggagtgtcataaaattaaaaattaaaggtgtctgagagtaaggggagaagcacagttacttctgatgtgcttgatgctaaagctccttgatttgcattgttttatggttgtgttgaaggatgatttctcagaacagtggtatttaaagcagctcttctaagttctaggaaggattcagtcatcctctctcaccagcttattttttagtatatttaatagtgctgagaaataaccagtaaatattagatattctttacccttatttttgagaaagaagagtgttttcactctctacagaagaaatatccttatctcttcactaatgatagtagaaataataggcatttcaaaataacagttacttaaacacataagggctcattctttcctgtgaataaatatagatatatggagtcttgggctactgtgatttccccataaagtcatcaaggacactagcttttttgatgttttttagtcctgagttctattttcaagatcacctcatggtccaagatggcggttgaagtttccattatcaagtccacagtccatgtagcaggaagaaggaagtgggtgtggtgcatacaaaggatgtgcctcacattggagtgagccttctttaaacaatcttcttagaagatctacgtcatacttgtgcttgtatattattgaccagcagctaggtttataatcaaactgaggtgaaggggaatcggggcagtgtaggcttttatctgggtgtcttcctatccaaatattggggttttcttactaaataaaaagggagaattgatatggggtgggtaaaaagacactcaaaatcataatttctcagcaatttacattgaccagtatcacagacaccaatttatagtccaatgatagtcacaaggtaaagggagaaggtggtgatcatgagggagatagtatataatctgagcaatgtaactcacaagtttcattattcattaatacattcattcattcacttattccttacatatatattagtaaagcatctgtgaggcattctctccctaatccagtaattgataggtacacatgtatttgactattcaaacccgtataagagccaaataatccttagttcaaagttttgctctgccacttttaagataaatccgaactcagttaaatagcttgtggatggggtgaggaagagggaccatttagaaacctagtaaacctgtggttcgatgacctttttctccacctcctccctggcttgggatttgattttggctacctgtggagagagtcatccactgaggggtctcagagacattgtgggggtgaagaaatgggtaggtgcccaggagatttcaggccagcccaacctgagttcagaggcttaaagtccagggagggcgagagaggatgaagcatgctgggtcagtcgggctggaggcagtgggggagtcggagggagtaggaggaagtaggaggtgctaacatcatgagaagcatgagttaaggcacaggttctcagggactgtgccttgcacttgtactcacttgttacatcactgactgtccctctctgctacattgaggcaaagtctgaggaaggttgaggttgcttctttctcttttcattagtaaagcaaatctggatagaaaagggtgagaagccccatctttgtcctttggaggaaagggtaaaactgtgtgacctcgacgattatgatgtgcactcttcactgagaaccactagtctgaatctgttccatttctataaagctttttccccagttctctgctgtgtacgtctagatgtggattttatgtggctgaaagatgatctctagcatgactgtcattttccaactgagcagcagtatagcttttcctttactgaacaattttctctgagaccttgaatcacttttggaatttaatttcatttgctttttcaatatgataaagtagaactctctctgaatttgattcctcacttacaaatagatatgatactatattctctgttgaaaatgttttggaactgtgaagatgctagagagttagatctcgtgtttcagggaacagaactgaaactcagaagggtttcattctgagggtgaagccagtgtgtggaataagagttaaattttaaggggtacattcctggatcatgccttgttcaggagtctttttcctgacccaagaaggcctccctcaggatacagtgggcatctcagtctttgtgaactcttaaattcatttcttacccagggtggctaactctgtcagtggactattttgtgaacttcatactttcggaatatgttatacttatgtgattcttggtagtctcaagaaccttggtagaggttcaaatcagtcaatctggttaaaggtatcagtattcagtcttggaatcaagtggcactagagctcttaaggcttggcggttttcaggacctacatcacaagatacagaagtggtgtggcttggagctcgtaagactcgtgtctggtccaaccaggtaacttggggcccctggcacccatatcagacttttctcatctgcaaaatgtgctgcttggagtgggtgatttatttagtacttcccaggcccaaagttctgagtctgtaagatgtagtggggttgaccagcatctccttttggattctcctttaaaactcattcctttgaaaggagattgctaaagtcaaaccttagaatccaaccctttgggctatgatttaatgttaaaatgctgtaccctttcctttcctcctttttctcctttactacttctattttgtttctttttcgaaaaaatataccttcttttaaaatttttcttcatttttccttcttctctgtaaattatcaagggcctttgaagagaattcttacatgttattaagaaattgcagtcagggagccctctgttcccagatcatttagaagattgcttttccttttgttaaatacaaaaaattgtcaacctgtattgttaaaatgtgccaaaaactgcattcaccaataaaaaatgtcagctctcattattgcccagatattattcttttcaaaagcggagcactcttgccaggctttctaaacaatcttcagctcattcatcttcctggttttgttacattttgaacctctctgggtctatataaggtggcagcctgtcttttaaaaattaatggattccaaatgccattcaaacctatttccgcccttaacctcctcctcttctccccaaccctgcctgttaggagtcttatgttctgtataaatattgagctggagatagtttctaaagaggtgtttggacctttaattaacattgacagcctgtctgcttaggattttgctctgctgtctccatggaaaagtcaggtaggtcagtatgtgggggagggacctctgcagtggatgtgttcctggcggctggccctagagacactgcactctgagccaaccgtgaagtcattttgaatttaaggagtcttgctaatccaaggcaatgtgtcttaatttgacaaagtaaaggctgcccgataagcaagcctcactacaagttctgtgaaacagggggtgtttgtaagtttagattgtgctagagaaatgtggtgatgtggaagaacgggctcattttctcctgtttactccctttcccaccccatccccctcctctctcccttctctcttacttactttggcccaaatcagccctgcagtctggcctctgcagtggcttgatgtgaaatttgagaaacatatgtagttttctatttcaggaaaatgatctcagggattgaatgtgtttttttgttggctgttaagctctgatcttgcccagtgtggttttttgatgatgggaaagaggcttcgaagtgctttttatcagaatttcatgtaataaaacttaaggtttggtttctttattttggcccccaaccccctcccaggctcaggacacaatgtcgtctattctgtcagaagtgggaagaagtacacattgttcatattacaatcacttctttgctgcttgcacacacatatataagaatggccactgtgtctatccttcacaaaagctattttaaatgtagttcagtggaggaccaaaggtctgcgtagtgtctcttacaaaggaaaagggatctgttgggggaaaagtctgcctttgttttgccttggaagggccagtatttttctttgttctagaggtgagtgccaataatgggcctagtgccctatcaagcaaacttcattaatccagccctgcaaagggtacactgatcagataaaagggacctacatcctcaaagctcaaggtatttgtttttaaacttttttcttactgtaaataaatatcactattgtacttaatctcatattcataattgtattccttttcttaaagagcctttacataaaagcttcaggccctacaaaatccgagagcatccttcatggaggaaggatagtagactcgagggtgagtggttgaactttggctctggtgtaaaatgcccaccctgggacttattgtgtgaccttgagcacgttacataccatttctgcacttcattgtcttatttatatttcatgggcttgttgcgggattgaacaggttcaagtgtataaagctcatagtacaacctgctaaggactcaacattagctattcctgctgctgtttttattatttgttgctggcgtataagacctaggcaaatggagctaaatactattgtctaccattaaaatattcaccttctggagggaatagtgcaagggtaacttcagatttgcattgaaaaacccatggactatcactttacatatttatttccttaccatcttcaacccttatccagacagctccaaatgcacattattcagaaaattggtgatattttcacagcactgagactaagctcatctcctgctggtccttatcactcaccagcctttcagccacatcagacatctcctcaatctctgggcaaaccaggccttttcatgtcttcttgactttgcacgtactgtttcctccccgcagagtatcatttgcccttttttctgcttgtcaactgctattcacccttcgagacccaacttaaatattatttgtgaattttgggcagttacacagactcttttgggcagttacacactactgtttcatttttcctatagttcttcaagaacttctctcattgtagtgtaattatttcttgacatacatttttcttctaacagcctaggaggtctttggatgaagatactacagtctattcacttttataaccccggtacagagtgcatgacacgtgttaggtgttgagaaatctgagaaatcgactgggaagagttttttttcataccattatattttaaaagctgcaatagtttgttccagaaaagttatatttttcccttggtgtatattctaatttaaaaggtgtttttaatgcctgattgatctccaatctgtaatgactttgtagcattttctttgtttccctgcattcagccttctgatttaagcagataatgcttggaaacacctgtttaagttgtatcttctttgctagttgtaacttcatgagtacagggaccatatatgttctgttcacagctctatccccaagtcctaatacagtggttggcagttctagaggtagaagaaattataataataatagtgcttgtattttatgcttaacagagcacttaacatgctggccactattgtgagtattttagatacattaaccccttcagtcctcccaatattcttatgttatatgtattataattatcatctgttttctacagataaagaaacagactcaaaagaggctaaggaacttgccggtggtcacacaatgattggcagagttgggattttaacctgggcagtctggctccagaattcaggctgtttgccataatggttccttgcctctgattagtactaattagcttagtacttgtttgttaactaattattaaaggaatccaacagagacctatttctctaatgtaaagagttcattcattaggcaaataatcaccctaagccagttgttctggaagtatggccttcagaccagcagcatgagcagcgtcacttggaaatacattggaaatgcaaattctgtggcctcactcccaccctactcaatcagaaactcttgggagtgggaccaaataatttgtgttttaaaaaaatcctccagaagaatctgatggatgctaaagtttgagaaccactggccaagactcagccattttctctggaattttacccctgatttttgcttttcttaagaagtcataattttgggtgtctcacttttgcatactcctgatttttgtgacattaatgtggggactaagctctaacctcagtgaatgtttttgctaaagtttctgagaaattttgaaggtttcaggtgtgtctgtagcttgacagtgtttgtttcttttgatttttttttcctgtgatagcttttaggatcaggaaatttaaaaaatatagtacctcctccattcagccctgctgtctcagactcccctaactggtgagtgaagaaggagcccagaggtgcagggataacagagaaaggggaagtagcagaatcagtgagtggggaatcaaagtttgatgttatcgcacttcctagaagtggcctcaggtcctttggactgttggtttacaaatggtagaaaaaagggacactggacttcaaactggacttggaatcccagttcagtctctctatctatgtgattctaggaaagtaatttttctgagcaacagttccctcatctttaaaatggggataatattactaatgttttaatgatgtgagaatttatggagatgcatgatgagcactcaattcatgcttgttgtatctatactgaaggaagctgtaagagatagagttagtcactagcatatttaccagtgagtgttctaagaaatggattatagattttgcagagcaacaaggaatccacagcattccacaatggctggtattccaaggatcgaaattctgggaggttcagttgcagagaaaactaggcaccagtttgaatgcattatgtcttgagtctgctttttttttttttttaaaagaaaggtatctaaaagtgatttaacaatgtcaggatttagacttaagtttttttctgttaaagaggccattgctgaaagtcaagacccaaggactgtacaaatattgatgcaactgtcagagatacatggtatttgaccttctattaataaagacaaattattgcatttctgtgatatttgagtctgcaggaacttcccttaattccactggtattccattccacggctaccagggctgctgggacaagggacgtggcgttgtgtttctgatttacgaggtggaatattagtctgatttactaaactgaaagagcaggttcagataacaaacaacatagtgaaacttcctgaataacagccacagaaacaactcatgtatttggtggtatcacaacaagtttggctagatttatccacagactagaatacaaaccatggaggaaagaaagcaggtaagcacaagtaaatagagggcaaggcagatactagtggactatactggatgtaggaagactttgaggaaggcttttttttgcagacatctgcagggtgtaggcagtgaagtgtttgttgtgactatttgccagcaccatcccacttcacaggtgggtgggtggttccttttcaccaagattttaatggcaggttgtgccccataaaagggcggggcagtataccctgtattagtttaaaaaaggtctcagcttacacgggacagcatttttactttttacccttgcctttgctcattcacagggagtacttcggaatcagcccatctaagcctcagacttcaaagggagctcattcctatttgacaacagtcatatccattttgccaactctttgacctttgaaatagcatctactcagtcaggtctgacctgtcaactgtctgtaaaaacccatccagatcaagaacttgatattttcaagaacacatctaaaggatgggggcccttctaattttgtttctccaggacttgttttgggagaagccagctgcttcttctggtcttaatgggatgggattatagatgggttgagtctgtgaggcctcaacttacatgatgatcctgtgtccttttattataggttgcacatgttttagccactcatggcagcatttttctccagctacagtcaattttgtctaattattgttgatcatgattttactgtaaaaaaaaatttttttttttgagacatggtttcactcagtcagtctggattgtgcagtggcacagtctcagtgcactgcaacctctgcttcccaggctcaatcgattttcctgcctcagtctcctgagtagctgggactacaggtgcacgccaccacgcctggctaatttttgtatttttagtagagatggtgtttcaccatattggccaggctggtcttgaactcctaacctcaaatgatccacctgcctcagccttccaaagttctggtattacaggcatgagccaccatgcccaggttgtaaaagtatttttaaaaagtgttttcagaggccatttgccatgggaaaatgggatatgttgaccttcctgtttacctccatttgtgggcttttggttgtgagcatcagttcatatccagttttggggaccactcttgggtatactttaaataattcagatgttgaaatttttcagaatgagaaaatctagagagaagtccagtttgattatactagaacctcatttgctgattaaattgtaaaattcctaattgcaacttggtcatgtctttgcaaaatagtaataataatattaacttctatttatatagtgactgtcttctcaaagaactcaaaacagtgtccttttctgtatccctgctattcccaaaacatgtttgtggcaatgtatgtggcttcaaaatgtggatgtatcattatgaaatataaatgcatgtggtgatggtatttattagaatcatatgttattggaagtacctaacattgggtgtaaaggaagcctggtcaagtttccaatagagatttacaattgggcctctttgtatctcagtttcttcatctgtatagtgggcataatagttcctattttatagagttattgtgatgattgtgttaatacatttaaagcattgacacagtaatgctgggatagtcctcaaatgctattgtttgcatcggttttagaatcagtctaataaatatgagtttaaatacccctttgtcccttgcttgttgtgtcgtcttgggcaataacagtaacagtcaacacagatgctatttattgaataatacttatatgtcaggcattatattaggcccaggatataagtgattatttatcacttattcctttaactttcttaaataggtatgattatactcattttatagatgagttaggtaaggtttagagaagttaagaaactttcccatagtaacagagttagattactggcaaagcggactctctgaattcttgtttttggttacctacttaggttcccctgaaccacagtttcatcatttgtaatagggatgacaatagctctttgtaaggattaaatattgtacataaagtatctagcacttactgtgcattcttgacatgatatacaatgatattatcctctccaattagagctttccatataatataatttttttctttgtgttccttatgccatgcatatatctttagagattaaaagacacttcttaagaatggattcttgcatttctgagaacttcagaatcacacttgtgatctgacacagtatatatacactcaggtattgatgtgtgtatgtgtactttccattctgttcagtctagaagtgtatagatgctcaatctgggtgctttgtaaggaacatcacaaatgttcaaaatcgtggatggacttgaacatgaaaatgccttggcctcaaagttttgcttttctgttctcaaagttgttgaggaaactggcttagttaaagctaagtgtttagaaaccaagtgtgttttggatggtaaggtggagtcagcattatatatattaatacatttttggtaccagaaacagcaacaatcccttagtctggtgtgtgcagatgtaatatgtttcatgatatttcagcctgtattttctgtcttaataagtgaaagcactgcagaattgggctgcaggccactgccccatttctctccttttgtagtcagatctcccttgtgaatgataaacacccactcctttcatttattcacccattcactcaacctcctacaatctaagctgcatgcttaccacctaccttaaagaacaccagtgattgcttattgtgacttacgtcataaatatgtattctagacatgacttctcacctgaatatcagtgtcacatccttcatagcctcaaaactttgaggaaatatcctcttatggcatactttaaaatttgtaattttaaagtaagcacaaagtacgttttgagaccttcatttttttctctaacaattctgttttgttttttttttttgtattctgtattttttgttaagtttatatcaggatgatttgtcattagtgttcttgtaacatattttggagttttccttgtgcaatgtggaaatagtaaggttgacattctgcttttaactcttctttataaactatgaggaattcccaaatagaatgttaccttgaaagactcttgacataagtagaactaaaccaaatattttatataattatttttattttttatttttgagatagggtcttgctctgtcacccaggctcaagtgcagtggcgtgatcatggctcactgcagccttgacctcccaggctcgagcaatctgccctcctcagcctctcagagtgcttgggattaaaggcatgagccaccatgcttggcctctgtaattcttaattattattttatatatgttatgagtatgagaactaagcagttccataaagatgagaattataatatctcattttagtagtattttgctttgtattatttgacattttataaaaattcatagtctcaaaaaatatacaatgttcttcgtcaagtagctaatactctctttcttagtgttcggtttaactattaatcttatcctgttaaattatttaaaatttcctaataattggcacataataacagtttttaatgtcagcattgataacatttttctgtcataatattcaactaagggatgcatcttcaatgtataaagcccataagtaggttttttcaccctagattagatctaaattgcttacctgtttttggaagtgaatattatgttattaacaataaattccaaactgctttgtattactgacattgtaacaatgtcttgatatgatggagacccttgctatcacattgtcattgatcatgcacattgatcatgcccgtgttgaaataggcaatgccagagacagaccaaagacgaaactggtagtgattttggtgaacattgttgccatgttaaacttgagtatatttcttgttgaacaaccccattttagagatacggaaaatgttgtgaggcagagatattaagtaaccctgcccagagtcgaatggttaataagtccttgccaggatttaagtgataaaacaaaactcatgcttttaactactatagtcttgtaagccactcaacaagtattggccagttaaactaatgaattccctcaaggaattgattctagtaatagagataaataatcaagtcataagtcatgactcaatgtgaaaagtcttgtgactaaggaatgaacagtacaataaaggaaacatgaggaacagtgaatcgtggtaggattatggagaggaggaggaaggaatgggggagagtggggcctcagagaggtgcaccaagactggggcccaggccttgcttccaaggtaccatggcgttctgtgtttttccttgtcttgggcatactattcagtgtttcgatttatttacttgtccttacctcccactaggctataagctttctgactgcagaggtaaattgtgtgtcttcatcacttagtgcaggaagtggtagctaatgagttggatatgtaggggcgagtacagtggacaggtgaagtcaggacatgatggacaaaagcatgaacatgaaagaagatgtgaacattcgttgcctctttaggaaatggtcgacagtgtggagtggacagagcacggacatgtagcttggggtattgtgaagggatgggtcagccgtgtatacttatctaccatggtaaaaagtgatattattagatttctgagtgcttgcctttccctaatgcatcttcatgtctttaaggacaaagatgtaggaccaagagtgggctacatcacaggagatgaaaagatctgtttgcatatttgacctctgctaattatcagcagtgtgatagtaggcgtgtcatctgacatcatcttgcctgttgcatagtagacatttggtaaagatttgttgaatggattaattaatataattatatgtttttgcggactctgaagaatttgagatacagctatataaaagagttactatttattggtacatattgcttagtatttggaataagcttggtaattattcactaagcaggaaacagggtttagggatttccaggcattagggacactgagccttgagacagggtagcagctctgtggttcagagtgactggtccaccaggaacagaaacaagctagtattgggaggtgagggagtaacattccttgggaggattatttggcaaaacgaagtaagaatcataggggcatagggtcatggaaaaggcttcattcttagtagagctctggagtacccatcaagtctgggtgaagatgcttacctccctgagagggcaagcatcaggaaagcctgggtatgggggtcccgggctcctgaggcccaggactcattgctaggatacagattgcactgtcaagtccagactgtcacgtgtgagtctaagcctattgttttggggcttgccatggtctggatggggcccctcttaaaggttatagagttgtggaagaaagggactgacacattttgatagtcaaagagtaaaagaagctatgagttaccagtgtgctggatgcttctgaaagcgtttgacaagtgctttttgagtttttaaattaaattacttttttatttttgtcttcctctctataaatcataccagagaaggtaacatttttctctatactgactttgacaagcctagactatgctttgtctatgtccagtgtacaaatgtagagaacccattcatttctttactcctcacatatttagtaaagtccggctgtgtgccctgcctttaggggacactgagcagaaagcagactcctccagacgattgcattgcagtataattagcaccataacaagagtctggcagattctagtctgtagtagcaaaatgaagagcaatcaggtctatccagggaatgaggaaatacctcacaagataggaagtgactgaactcggacttgaaggatgatcaagaatctgccaggtgggtatgggggccacctggcaaaaggacagcatatgggaaagcagaggcatgaaagaccttggtgcatccacaaagcgttgggcacgtgagtctagccagatcacaggttgtgtgttggggagcatttagagaagagaacacaaagtcctcacgtgctttactcaggctttgggcttaaggagtgtttctgatgtgggctctggagccagactgcatggctgtaagccccggcctctctgcttcacacctctgtgatcttggacaagtaccttaactttctgtttctcagtttcctcatctcagatgataataggacatgcctcacagggtggttgtgagaacctgaataacatcgtaaagcacttcaaacagtgtctggcacatcagttgttattaataataattatataagataaaattatataattcataatgatgatgtttaatttgtaacctgtagtcaaaaagtagaaccaaatacaacttgcaagggaactggatgcttctggaagagtttgataagtgttgtttgagtttataaagtaaattaccttttttactttccaggtaaaaaaatatacctttgggaggggaacaacacacactggagcctgtcggggggcggggccacaggagggagagcatcaggataaatagctaatgcatgtggtgcttaatacctcagtgatgggttgatggatgcagcaatccaccacgcacacatttccctgtgtaacaaacctgcacggcatgcacatgtatcccggaacttaagaaaaaaaaatacattttttctttccaggacagcgtcagtccttaagaggctagctcaaagactagaggaaaaatagactactaaataaatcaaaattatttagtagggtatagagttatccataaagtgctgggggtcactaattattaaagcagatagagcacaggtagttgttgagcgtagaacagcccaatcagaatgatgcctcagaaaggcagtagttggcctcccagagtggagcatggattgcagcagggggctgaggctggagggggagaagtgttgaactaattcaagggatgttggagggctaaaccagtgtctcttctgctaaatctgagcagaagagacagatctggaagcttctggtaaggtaggcttgattgagtttggtgagaagttagatgaggagggtgagaacctagcatctgggtgtctgctagatagatgctgctgcaccacaccaatgtccgtgtgtctgggtaccgaggtggtgttcaggacaggtcttctccacgtactgccgctgagctcacatccacgctgtgcatgctgggctgagttctcttcaggctgttttcagctgacttaaatgcaacacgtgatgatgagcatatttacataatgtatgcctggtgaaatcacgaaagattggaatttcccattttaattccattttaaagatgcttgttaagcaaaaggatataattcatttttcaaactgctgaaatgttatttggcctcttgaatcaaaggcattccgcaagtgttttctttattacatgccttaaactttaattagaatttaattataagatcctgaaggcatgagcaagaggagcagatgggatagtaaaagcagcttagtgagggaggattaaagattaaaagttgcttgttaatggcataagaaatgaacagagagctaaattactatgcttttgtgctatcctgatgctttttcgattctgtaacttattcctggttgcaggtttttcaattctgcaacttattcctggttggaagttgaagaatctcacaaattagatttttaattttttgagttgctagagtagatttgtacatagaaaacaggtaaaacctgacaaaaaggtgttttatggctagtagcaccttgtacaataatttctgcattgtaggggcttagtggtatttactgaattgaactaaaacttacatcatctcactagtaaacatcgaatgagcataaaataagatttttttttagagatggatggggaaggtgtgagtctataagtccaggctaacctgtcccatggaatgttagatacctactcaggaaggtaacttgtatgaacctcccacctttagcctaccccccagtcgaccttagtcatttgccccacttggttggttggctagaggagtggtagaaatttggtgtgggaaacactttgagactgctcctcatgtcacacagtgaggatgacctgctctgctctctggtgctatgttacgatgatctcccgttaggctaaattattctacttcttagtgctttttcccctagcttttttttttttctttttgaaatctgatatttagagtcctcttccccacttaattgcaagctcaatgaagaaaaactagagaacaataagatagaaaagaagacaaaaatgtagtgaaacaaaaagcattctatctcctattttccaggaacaaatgttttttaaaaagcttttttaagcctgttaatagacagttgattcttcattatttgcagattctttgtttgcaaatttgcctacttactaaatcttatttgtaaccctcaaatcaatacttgtggcactttcacagtcattcgcagaaatgctcagagaggaggataatttctgagtctctcgtcatgcgtgttcctagccgatggcaaataacacaacaccctgccttcttgtttcagctctcatagtgtaaacaagtgtccttttcgaagtctactcgtgccatgtttttctcatttttgtgctttttgttggcgatttcaccatttaaaatgcaccccaagcattgtgcaaaagtactgtgtagtgttcaagtacagtgcaagaaagctgcgatgtgccttacagagacaataacgtgtgtttgataagcttcattcaggcaggagttaagtgctgttggctgtaagttcagtgttattgactcaacaatatatattaaatgagttgtttttaagcaagaatacacatgaaacagggttgcgtattgatgagttggcaaaaatataactggaggctcagaggaacctagccctgtatttcccttaggaacaatggtccagtgttccctaatttaatgtttttggagactaccaaaaataataaggtcagccatgtatctttctccttttctccttgctcttgcttgatctttccatctcttgttacctcaatctgtgtgtatatgatatgcatatatttacttaaattatatatgcatatatttagcaattatgatatcacatgatacacgattctgcaacctgtcttttaacttatcaattgtgttggcctttgggctgtttgcactgagatccatttgtcacccttgccctgctctgcaagggtgctgtgttacagggggttgacccctgccccctgacaatttgtcatcagtgggagatggcaaggcaagagaaagagaagctggagtatttgtccctccctctgtctgccttgggcagcatctctggcagtggcccctctacagctatcccacctgcaggttgggtcctccatggctctgtcatcggctggttggtcctgggtctcgagctttagccctgccttcttcctttgtccttttagctgatgggtggaagaagcttcctgctgatgctgatctctgagtttcttccctgtcccctgggtagagcatcagatttaaaagccaaggcaagacaaaaaatgagagaatggtagcaaagatccaacactttacaagaccgcctgagaaaagggaggagggggtggttcgacaccagggcctgcacactgagtgtgtgatgttgcagctctgcaggcacagattaagcagctaagatgccatcaatgcttggaaagcagccggtgcctcttgtcctgagcttatttgtctggaatatgattcccttgaacctgactagctcatccacggggagagagaaaaaaaaatattctgatagttatcctgaccaggctctaacagggcctccttccctaggatataattttttctggcctctttccattcacttcttcacattaggacccttttcccccagagtgtgagattccctgagggctctaaaaactggaatgctatacagcattttaagccccctgtgttggcacagtccttattaaaaatgtattttcctcaagccatggctgcaccccctgaagtgtggattaacagaaaggccttcagagctggaagacatttttgaagaaccgctgtaccaagtggcattaaatatttattgcctactacatgtaaattgttcatcatcttgttttaactcttggaccaaaaggtttctcatctgctttctgctaaagtggaaatcacaggaaaggtactctttactttgctgtggtattttgttttcccaggaatacggaatatttctttgttctcataagtaatactagaaaagattgccttgactctcagcatttcattgggaggccatgtggtgtcatgatggagaaaaactcgaattctggggcaagtgcattgggctttgccacctgcaagctgtgttggcttgagaacctgataccatttatgtttgttgtgctggaaaaatgggacattgcataaatagcagatagcacaattcctggcacccagtaagttctctctttctcctaggtcttctatttgggactttgcaaatacatttctaagcaacctagaataaaatatgctattaatatgctgttaataataaccaaaagcactcagcttaatctttacttattaaataaaactgaaatgttgctcagacaccttttgctgtttttggaatgcctttgtagacacttttgatcttgcttaaaaaacataacagcatttcaaaggcttatcttagctattcttattcatacctgaaaacctacagagtttggataattttggcacacatatgtgtgcacgcatgtatatgtataaatattctgtctctctaaatatatatgtatatgcaggcacatgtataactctttaagaaatgtttttctaatgtttaattttcttaaagtctgtacttcacatcatttttttccccagaactgtttatcctcactccagacatgacccttggaaaggtggcagaaaaaacaaacggctggtgtgttttggggcagtctgcattccttttaactctctgagaccaggcttatgcatgggctttcaagctatttgtccagaggcccaaccactttgatttctgcttgaaaattagcctgttgttcaagctcaggagagcttccacagagctttcttgggttcgcgaactagagatctatgaagtgtttgcttttatttgtaactttaaccacggcagccttaactggacttttgttttcttatttaacttttatccatgtaaccttaacctaagttctttttcaaatctccatcctcccccatctcacaatttctaatccctcttttgtccttagatttttccttcaaagtcaggatatgacatttatatctatgctttaggaagtatctgaaagctaacatacacatagaattatgatttttttcttgggttgcttaggaggattaaacaaaggttttagaaggcagaattcagaaaaaaattgatagaagttgtgctgcagcttggaggggagtgtggattttagaaagcataaggacactttcatttgtccctttcatatggacttttatttcctctgcgagaggcccaggggcctggcctgtggatggtttagacaggaaaagactgaagggataactgcttccagaccttcagccttgaatgttcagccattattcaagccgttgagaaagggagcaagaggcataaggaggcttcgggagtttccatgcagcttctctgagttccagcttgtgtgcattgttctccaaatgtgtccccagcactactgaaaggactttcatacctcaactaacccttattgcaagcctgtgaaggaagagttttttatatatatatatatatatatatataaacagacaaggcaactaaagctctgggaggttacagaaacttaaggcctaagtagggttacattgagaccagattaatcagttagtagattgtctttctatttcatcatgtgcttcatttcctccttggtttacatgacccttctttggaaatttccttctggtaatatcttagttaaatgaaataactaagttttatggagtatccattatgtgttaggcattgttttatgcaatatgcatctatgtagtgcacattctgataggaaccatgtgaagaaggtgtattacctccattttagacaggaaatccctgcaatacagagggttaggtaatttgctcaagatcacacaggacacagtaggtgacaccaggatttgagcccaggtctgattccagaacttatgccatgcccactacaccagccgtccttattaagaggaaggccattggtatgaggccacttgaaatagacatggtagatatgtggcaatcaatgcaaaggtattgtctttcatgctctgttgcaatctcatttcatttctagcattataggtatttaaagcagaggtaggcttgctttcttagtttcagttttctgagaaacaaagatagtaacaacaatgatgatggatcttgttaccatatgtgaatatctgtgtgtactaggcacggtacttggtctttacacatgttcttctaggttaaccttatgacaactctgtgaagttttctcaaatttatatctgagaaagcactcagaaaggttgagtcacttgcttgcccacatcacactactagtaagtggaggagtgaggatttgaacctaagacctcttacaataaaattatgttctttccactcagtatatgggacatgtatccctgggggcacatgtgagaactataattggtctgtaagattattgatgatggtatagggatagggtgttaaagaacattgatgcccatagtgaaaaagtaattccctttcacttgtcctaccaaccatctggttacatgaaagaggaagtctcagttaggtgccagtatgccttttacaattctaacagagaacagggctcagactctgaggctcgggcaggtaattgaatctagaagaccatggtgacgttctttttgtttttattgtattttaatatcttctcattaaaaaatattataatgtgttcatatatacaaaataaatgtaatgtatatataaggttaaaagaataatataatgagtatccatgtacctatcacctattgaagcattagattaattttagttactatgggaaccttctgtgtcactcttcccatcccaacttctttctttctctcctaccaacatcttacataatcactgtataactatcaaaatcagccagttaacattcacataatactattactcagtctacagactttttgctagttttgccagttgtcatactgtttcatttcctggaccagaatctaggatcacacaatacatttactagtcatatctcctttgtctttggaatagttcctcactctttttgtctttcatgaccatgacgtttttggagtctggttaggcattttgtagaatgtccctcactttgggttggtctgatgtttccacaatattaaattcaaattatgtgtttttggcagggaagctacagaaatgatgttgtgcctttcacagtgcatcacagcaggaggcacatgatgccgatttatcgtatcacaggtgatgtgaactttggccaatttgttaaggttgtgtcttccagtttatccactgtaaagttactatttttccatttgtaattaatgattaccttgtagggagatactttgagattatgtataatatcatgcttcttatacctttgtccactaattttagcaactattgtaaattcttgcctgaaacaattattcctgtggtttttccatatggtgtttttctatgattataattctttctatatttattaactggaatgctttgtaggtggctttatcctcgccacacacttatttattcattcagttgtttatttgtatcagtatgtacttacaaattcttattttattgtctggattataatccattagtatcattattttgttttgcaaatagtccttttaaccaatggggatcccttcaaattagcttttctatctttctgacatgtctccatcttttttaaggcatttttgctttctggtgccagaagataccactttgtgctttacttgctccaaccctgagagaagcctcctcttgctgttctgcatccattcctctcagtcactccttcatgcactataatatgatttccactctccccagtgcactgacacttccgtcacttaggtcattgctaaagcagtagatattttaattcttctattactgcatatcagacatctcttggccccatatcagatcttctcaggaggacagtaaagggaaattgtaccatctcttgttccagctgccgtgaccaagtttgcatagactctgaaaaacttcctacagtataagctgacagtacctcacctcatgctgcatgcttttccatagggcaccccacgaggttccatggggtttccttgtggttgctacctctggatctcactctgttcccacacatgtacaacctggatagagaattaatgcctcctttctctctatcgtggatggttctgagatacagttcatgtggcttggggtgtggagaggttgaggatgatcctatgggatagagaacgagtcacttctagtggggccatcttgataccacaacttcatcttgcctccccctccttattatttgttttattccctttgtctatcagtcctctccttctccctaagattgcactacctgatgcagtagaaccctcttccttgggtctgctgtctcggggacccaggaaaagatgtgcagtgtttaaactccttctctataatctcttaactttcacactatcacattttcattcatttattccaattcattcattcatttacaccttatttattgagactttccctgtgtgagacattgtgtacaggtagacaaaaatcttgatcttatagaagttattgtatttgggggagcagaaataactaaataaaaccaattcagctgaattataagtgcttttaagaaaatgcaacagggagagggcagagagtgggccacgtggggcctggcattgggatggttaccacatacactctgaggaaatgacatttgaactgataaggggtcagcaagaagaaatgggctgagagaagactgatctattcacaggaaagaggaagtgcaagagccctcattttctgttttgcactagaactgctttcctatgattcttcagattgtgccacctttcttccaactcccatgcatttgcacagattgtttctttgacctggaatgccctctctgacttaccaagctggcagatttctatccttagctcagatctcatctaaagcagctctccacccccagggacattttaagtcctttttctgttgttggtgtgctgtgctttgagcacagtattcatttataatagtgatgtcagtgtacgccttagaattgttcacctgcatctctccttcttggactaggagcactctgagggcaggactatgtttgtttactttgtattcccaacaaagtgcttatagggatttaaatctatttattgatgagttggatggatgaatggatgagtacatgggagaaagaggaaaaatgatatatgaattgaaataaataaatgaaagagccagtgaataaatgacagtgacctgaccttaaggcgttgtcttgtttgtgggtgagacaggagtataaccattcagagtactgtgatgaatgcttagagattctcagtgcatgaataacagtggcagtcagcaagttctgctcatagatgcatattgtttcagctatttcatgcttatttatttagtttttaagaaattcatttaggtaccaaacataaaaaaaaacccagacttgcagctttccagatttggggccagacacatgactgtaatcccagcactttgaggggccgaggtgtgcggattgcttgaggctaggagtttgagagcagcctgggcaacatggcaaaaccccgtctctacaaaaaatacaataattagctgggcgtggtggcacatgcctgtagtcccatctccttgggaggctgaggcatgagaattgcttgaacctgggatgtggaagttgtagcaagccgagattgcaccactgtgctccagcctgggcaatagagtgagatttcatctcaaaaaaacccaaaaaacagatttggcagtgctggacccttctacatggagctggggacaaaaatctgctggaaagtaggaaattattagaataactaactgtattaaaatatgttgaattcttcttgtcatgactgttttgacatttgtttgtactagttaagggaaaatgaaacttcaggttgacagcctttaccttccttgtgccataattaatttgctctattctgtttgttcaggaaattcagcttttgaaggcccagaaagaggactaagggtgcaggtggcaaggaaaggttgatttgtggtgacctggcatactgtattccatctttaagtcctcaccacaagtaggcctttatccaggttcttgttacctggaaatgtgtgttcatttggggtatctagatgaggcaggacttcaaggaaggggatggataatgcacttaatcttcatcttcacataaggatagctgctctttatcttctccctctggaagctgccattgtgaggcagcattaaggtgggagaggaccctctggagttcatccagaaccctctgggggcacctgtgtcccttctgtttgtcagtgtatcagccatggatcctgcgtgaaacaggtggcacatttaaatggggtaatccgagaagagtggacaagtgtagggaaaccacatggatagtgcaagatgcttggctatctaaagtggggctggtactctctctgggcctaaggaacaaggagaggggctacgagcaggccctggggagattgttttgtggaggtacttacctttgtgacctttggtggagagctgcagccatcctacactttctcctagtccactgatatccctctgtgtcctccattagctgaacctggctggaggccagaggcagaagagccctctggtgtgctccacacccatcagcatcctggcttacaaggcagggtggagaaagttagagattgaatttgaagagcacatggaagatgtctgggacatctgggcattctttctgtgtggttggttcttgtggtcagatatttgtggaggagtgaggtggtggtggtagtggctgtgctttagagtcagtgagtctgggacaggatcacatctgccccactcgctaacggagttaccctcagctcaaggtcagcaggcaccgatttctttgccgtctggtggggccaagggcaaatgcctatctcaaaaagctttgggaagatcaaaaatgaaaatacttaagtgtttttttgcagatttggaaaaggctgaaagaagttttattaaaatgtgagcaatatacctcaataaagttgttttcctatataagacaaataaaactgtgttgtgatttcacaacaagtgttgatttttttcttcattatatttttctgtattccagattttctgtcatcagaaaaccagacatccataagtgctatttagaaatatgttagtactgccttcaaattattactgttggctaatattgccttctctgggttactgaggtatgtgaattcacagctgcagcatagctgacttgactatggacagactagagtgaacgtgtatgtcatttcttacgatgtgcccatggattcaggtctagtgccccatccccaggaagcctttggcccttcagatgcttctcctctgagctcctgcagctcctgggctgcccctagcagttatcacactgttttgcggttttctccaccactagactgtggtctcctctaggtccaggactgaattttattcatctccaggtcagtgtctagcattgtcttgtaaatgctgtctttattcatgttgcccagcttctaccacacggctactggaagttctcaagctcataacaccgtagcttctacaacagagagcaactgactgtgctttctcctttctgttttcaaagccctgggaaagaattctgattagtttcatttgggtcaagtgtacctacatcccttattgaaccaactatacccatggagaggtatattacagtgatctcagctttggtcaagtgctcattcccagaggaatctgttgtgtggccaatagggtaggatctgtacaactatgacaggtcttatttaaatcaattagttacagtggagaagagaatgaatcagttaggaatgctttcagctgcagtgacaatgcaaaaaagcttttatttaaatcagttagttgcagtggggaagaagcatgtatcaggaatgcatttgcaagggagcaaaaattggttcttgggggatgaaaaagatcttagatattacaatcatttgtggccttctaaagcccatccttatgtaacagcataagtagatacacaatctgtctgtggtattgaaatttcacagtggcagggaaaaggaaaagactgtctggaaagggtctttagtgggggcgatagtgaaaaaaaagtttgagagtgatttatgatgacaataatcatacctaacttatttagtagttatgcaccaggaactgttatgaatgccttacatatactatattaaatcatttcaccatatatccatttgacagtgaccaaaacacaaatagtcttgatttcccactctcacacccctaaattacaagtacaaagatgatttgaccatgtcaccttcagcatatctttaattctttggacttttccctcatgctagctgcctcatggttgtaggatagttgctgcatctctggacgttacattctcctttgatgctggaagaattggtgagaagagcatgatgagattttttgttttgttttttaaatgagaggagcaaaacctttcccaggaatcttctcttcctactatacttctgcttaggtcttattggctggaattaagtcccatggccactcttagcagcaagaagcagggaaagtggaaaacaagattatcatggttggcttaaacctgcacattccaatatgatagttactagctatatggctatttaaatttttttagagagatataattcatataccctaaaattcaccattttatgtatacagtatagtatttctagtatattcacaggattatgcaaccataccccagtatccgattccaaaacattttcttcgccctcaaaagaaatctcatatccgtagcagtaagtcctcatatccctctacacctagccattggcaaccactagcctactttctttctctatggattttcctggacattttgtttggcttctttcacttggcataattttttcagggttcatctatgttgtagtatgtgccagtaatttttttatcagttcctgttttaattgataatactctgttgcatggatgtatcctattttgtttatccattcatctgttgatggacatttagattgtttcactttttagttactgtgactaatgctgctgtgaacactgattgatgtacaagtttttatatcaacatagttttgatttttctttgaattctcttgagcctattagaaggagtggaattgttgggttttatggtaacaccatgtttaaccctttgaggaaatgtcaaactgttttccaaagtggctacacattttgtacatcctggtaggaacatgtaaggattccaatttctccacatccttgtgagcacttgttattttttgtttgtttttattataaccatcttagtgggtgtgaagtggtatctcattgtggttttggtttgcctttatgtaatgactactaatgttgagaatatttaatgtgcctattttccatttgtatatattctttgcagaaatgtctgttcagatcatatgcccattataaaattggattgtctttttattgttgaattataataggtacttaaatttaaattaattaactttaagtaaaatagaaaacttagttcctcagtcatactggccacatttcaagtgctcagttgctgtgtgtggatagtggctatgttattggacagttgcagataaagataatttacatgattgcagaaacttctgttggacagcactggcttagaaccaccatgattgatcacttatagctgggcatatgacttctctaaataaaattgaggttttgttaagctaaggaaggattggtactccagaaagagtgaggtgtcctggtcccagaaaaggaggttatgcagactcagtgtataactcctaaagatgcatcagagtttaccaagggaagaactggggcaggggttgagtgggagggcaaaattctagaccagggcttggcagatgtcttttgcaaagggtcagatagtaaatattttggctttgctgactatatgatatctgtttcaactattgaactgtaaccaaaaagtgtctgagacagatttcaatcgatttagagaggtttattttgccaaggttgaggaagcacccgagaaaataaacacaagttacgttaggatctgtgactggtgttttgtccaaagaggattgtgaggacttcaggatttaaaagggaaagagtgagcaggaagggaaggaggaaagaaaaaaaaaagtttgaggggcataggcgatgaggcaagtggttacattcttgtgaggctttgattagtgctcaccaaatccacagtttacatgtgaaaagaggagtgggggaaagtcatttatgctcagtaaatctacattttacgtaagataaaggaagcatgtgaagttacagcaacccatttgagaacaaaaggatggcagttttttgattttttctttttttgtgtgtgtgtgtgtgactcagttcccaagcttaacttttctctttaacatagtgagtttggggtccaaagattttattttcctttcacacaactttgtccttatagtgaaaaagcagcctaagacaggccataaatgaatggacatggctgtgttctaatggaactttatttacaaaaactggcagcaggcacatttgggctacaggccagggtttcctagggacaatacatagaaaagtatggaagccagaaggggcctggcatactgaaataaagagaatggtaagacgtttggtatggctgaaaactggctgtaggagctatggctgtagagaaggctaggaatagagactggaaccagattataaagggtccgcaatgcatatcaatgttgttttgttctggttggtggtggtggttgtggtgctagtggcagtggtggttttctaaaatcctctaagtggcaagaagccgtcaaatatttttaagtaggacattatatgattatggctttttagacaaccctctggcagcattgtgaaaagaatattggaggaaatgaggctagaggtaaaaaaataccagttaagctttgtattttgtattaaaataaagatctggtaattatcttgctaattgcatcagtagagacatagaccaccaagctgataattcttatcctgactaacctactcactatgagctgagtaaaaagcagtattgatttaaatgagttatgaagagtggggcttggatatgctctttttatatcccaggggaatcaccctggaaacctagagaactggttccaagtattcatctgagaacatctgtgactctcagaaagttatgagattggagttgtacggggaaactcgctgtggccttggaagagttgacttctaaatggggtagtgaacttattctccgtggctcagttctaaaaggccctaagaggagaaaaggattcttgatgaactactaattgatgattttaggtccagagttaagcataatatggaggtttgcctgagagtgtctgccgtcagtgaagatgaattatccatgtgggcttagaaaatcacacatgcaaattatgtgtcaatggatttttttttcaacatgctaatcctagcctttgagtacacagcatattttcaaagccaattttgcaaacaactctatggtaaatgctgctaagctgttgataagttggctttccatttgtaagcctattagttcagaatcttctgaagtttaattcaaaatgagataatgtgtagtgatttgacagttttcattctgtgacgatgctcttcaagaaagcatcttggcttgttcactagttgaatcctcaccagttcctgaaattatgaaatgtaaatttgttataagcagccgctttgggcccttcacaaggcagaattgtaccttatccctgagtggaaataaatgaacatctcatgtgtgtagcttctctctctctgtacatcctgactccaaatgctgtgaggcaccagaaaatgtctcctgaatctgattttgggtggctggatcaatgtccagagggaattaggaatttttccaatggtggtacagatagaggtgataacattagaaaagactgacccttgacaagacccacattagtgaagtcgttattcccaaggagttgggtatgtacttcccacgtgttgtgaaaacagggctctattaccttgccagcaataccccaaaggcagaggctgtatttgtccttggatctcagtctttgacattgttttgggaaggtatgatgagaggcatgaggaaacctcatccattttgtgagtccagtgtacttaaacggtagagactgactccagggcatttggagttcacagaatttgtcaaattatttttcaagcttgtagggttcaagacttccccaaatgtatttttccaagtgcttgtaccctggtgtccattaagggaaatgtactccatatgtttctaattcttctaccctgaaatgatcaaaatattatattgctgagatctctgaagactagaaagatccttttcaattttttttttctctttgatgacactaacagaaatgggtgatcccagtaatcacaaagaggctcaaattcactcccaaatgcccggccaccaagaagctttggacataagtattttttgggggtatttgtgccaactgctgttttaggacatgtttctgataatgctttacacttaccagaaaagctgtttttgaaaaatccagtgttgtcttacaatcattaatttaaaaaaaaaaagtttcccaagtattttcttagagcaaggagatctctttctgatgaagaatacactctagcctaaaaagccacttaggtggaccagtttctttgattaacaaaagttacaaaggggaaaagaagagtgttagagaggatacctgtaacaaaaagagacaggagacatatggaacactcgtggtgtgtcacccttatttgaaccctcattcaaacaacaactgttaagaaaagtaaaacataggaggcatatatcaatacagaatggctatatgatgatattaaggaattattctttttaattatgatattgataattagctattttttgaaagatacctccttttatagatacatgctgaaatatttacagaaaaattttttaaaagcctggaatttgtttaaaaagaatcagggtgtggtatagttaaaactcctccctccctccatctctccctctccccctctctccctctccccctctctccctctctccttttctccttccctcactcccttttcttcttttttccctcccctcctccttcccctcctttctcccccactgccccagcttctcttcccttctgttctctttttctggccttcatttgggctgacaagaagaggatgcatgttttatatcaggttggcaggtatacttgagatatattgtcttggcaatacaaaggcctgacacttcctagggacccagatgggtattgtagatgtttagggcatgccttgacctctgagtagccttcttgggcttgaggtctcatttgactagactaccactccacagtcagccactgtggtctgttttttaaaaacgttgccatgatgagaatgtgaaggatttgggttgaagttaaggacacttcctttttattattagtctggagttttaaaggagatacctgggatcccacccttactttgttactttgatttggagtcagcccttggctttgagagtgtgctgtgatattggtctgatttaatcattgcctatgtagaaaaagagattagatcactggatcccaaactagcctcagaaagtaagtcattgatggcaagaatcacctggagagattttcagtttaattcttaaaaaatttagtgacgatacttggataaccctctgggaattctgattcagtagtcctgggtagaaatagaatctaaatatctgtaattttatcaggtttctacacgattctcatgttccaatagtttggtgatttaccaggttcaatgccttttaatagattcagttgctcaggagcagattgaggttgtatttccatatagtcctaccttgtaaaaaatggatgtgtcaagttttttgttggtgttattgtttttaattgttattttgacttgctgggctgggcgtggtgattcacgccagtagtcccagcaactttgggaggctgaattgggtggattgcttgagcccaggagtttgagaccagcctgggcaacatggaaaaaccgatctgtactaaaaaactggaaaattagccaggtgaggtagtgcgtgcctttagtcccagctactcaggaggctgaggtaggaggactgcttgagcccaggaggttgaggctgcagtgagctgtgatcatgcgctgcactccgatttgggtgacagcgagaccctgtctcaaaggaaaaaaaaaaaaaaggttacttgcttatgaataagaccttccatatagcagttattatataagcactaggtaaatattaataaatggcaaatactaaaaggaaagacaggaaaaggaaaggcaactgatatttattgaaggcctactattatagtaaacttgactcataatttatattttcttctttaattttaaccttggcatgcaatgattattacccaattttgtattcagtaaaattaaagcccagagaagtttagtatttttcctagagtcacatagtaaacacgtggcagcaggggtgtttggatactattgtgccaggcagcctttccgaacactccagcctatttctcaattctttcttggctccagaggattgtgtagcaggaggggaaatctgttcagagatcaggaaactggaccaattgggcaagctgccagagcttcctttactggattgtaccagcaagtttgtttttctctgtccaatactgggtaaaggtcccaccgaaagcctttgtctctgctcagaatgcctggtatgatctctgggaaactatttggcaaaggagtgtggcagctgaagcacagaagcctctcctaggtggttcacccatatctgatttttttttctttggcaccttgtaacagacctgagaatgttgaaattttgtgccaacgtggacaccattcagcatgtcagatttctctgataccgtgaagatcaatatgttggatgcaaaggaaaagtcccagcaatagattccagccctcactgccacttacctggtatattacaacagcctccatactggtcttcctatctgcagcctgtcctctgctttccggcccacttttctcagggggatcctctttcaaataaaggtctgattatgttcctccaatattaaaccccttcagtgactccccagttcttgaggaaaaaatgctgagtctctgagcatagcactgaatacccttcctggtctggccctgtttctccgcatgcttctcccactccacccagcttctggcaggtcatactaccgtggctcaccaaagatgccttggaaaccaggtactttcatgtctctgtttctccagctggagtttcgttccttctttgacctgcctggcaaactcctatgcattctttgattcctactccttcatgaagcctttcagcagtttctttcttagcacaactctaccaccttgtctcacctgttcacagacatctgcctgcctccctctctaggctatggtgccctccaaggggaggcaaggtgttgttttcaaatcattcacagtacttactacataggccacttacagtcagtgtgtaataactgaaggaggacttgagtgaataggcaaataaagatggttaccatgataggccgagatctgaaaagaagctaataatcaatgcatgaagatgtgtgaggaacttgtgtgtcttcagtaccattctaaataccatacaaatacaggtgccgccagagtgcttgcacatggcagcttcacagcccatttgagaagtagaattaatacatgtgaagaatgaggccgggcactgtggctcacgcctgtaatcccagcactctgggaggccgaggcaggcgaatcatgaggtcaagagattgaaactgtcctgctcaacatggtgaaaccccgtctctattaaaaatacaaaaattagctggacgtggtggcacacgcctgtaattccagctactcgggaagctgaggcaggagaatcgcttgaacccgagaggcagaggttgcagtgagccaaaatcgcgccactgcactccagcctggcgacagagtgagactctgtctcttaaaaaataaataaataaaataaaagaatgagtaagaaaaccaagaaaatatgcaatttagttcagcttgtttggtgctggtaatactttatttttcatgtgtcgatttttgatctccaccttgcactgtgagctccctgaggacagggactttgtcttggcaattatgtcttcacacttggcatacagtcagttttcaagatatgtttgttcaatgaataaatggatggtaggcaccattcagtgctgtttagggtcaaaggaaggcatgatttgtgtgggttgaagtggtcaaggagggcttcacacataagccagttatgaaggatataggcattgaagaagcactaaaactggttgtgagctttactcttcagagagtcacagttttagaaaagctcttgctctattggaaagaatatgggttttagaccaaatacatctagaatcaaatttggactctttcccttatctgctatgtgatcttgagatctctgagtttcagtttccttgcccataaaatgaaatcaatattacttcccttagaatatgcttgtgagccgtaaaagcgatatcatatataaagcatgtagcataatgcctagcgtacattaggctctcaataaatggtaagtaaaagctgatatataggtatagtgtgtctgaaatacctgggaaacatggattatttggatgacgtagtaacatttgattaaatttgcatgattattatattggcacataacaattagaattataatagattccagtatttttatggccttttaagtgtgttttggggatttctatcacatttctttacttttttaacattggaaaattggaaatggatatttgcccccaaattgtctgatatatagatctcgcccttcccattacacttgtgaagggaaggcttttctggcaggaggagcataatgcgtagaggagggaaagggaaatgagctttccattttgggagaaaaattagagctactcttccagtgacaaaccgcattgcctggctttccttctgcaggctctgcctcatgcctgtgttcctatagacattggagttaaagctctcattcatggtcatgattctcgcctctgtctaattcttttactttgtcgtgtaccatctctccttttcccactgttttttccagccacctctgtttcttttggtttccttgagcatgtcaagttcttttctggcctatgttctttgaatttactgttccctttgacagacattcttttcctctggctcttttcatttttcagaaaatcagctgactccttaccctgtggtggtattggagccaaataatggaattgatttttcagtgtttattccacataattccaaggaatatgattttaagagtgttcacaattcatatttttttttaatttttgaaattgaataagtttcaaatacgaaaatttaggaacatgatacaaaacttttctctgtgcaccactggagtactgcttttgaaatcaattctctctgtcctggattacccttagagctcctgtctcctgcatggaggagggtggagggcatttaacatgtccatctctcaccccattctacctgagcttccagcaccaccacctctgggcagttccgcttttagtcagcagctcccagttcccataattttgacttctgtccttgctagtccagaagaaatggctcttctgggattgaattcctccctttccccagcagaaatggattggggcagaggaattgcggagctccatggcatagagggtcctggaaggcttgtcattagggtatccagggtgggaaggggagtgaagggaggggaaggaggaaggaattgagttgggaagagtcaaggaggatgaatgaagttgctgactgatgtctggaataacattatttcaccctcaaaaataccagtaattcaggactgaaaaataaatttcacaatatgttttaatttcaaaaagtgatagtgtatttgacattcttatccagcctggtctcacctcaggagttcccccattggagaggccatccctgaatttctaactcacaggcctcccctacgttaatatatttatgtcctcctggcccttgtttactttttacttgtttacttttgcttttgtttacttgtttacttttgctccatgaagtcagggacctgcctgcttgctccgcaatccctagaactgtgtctagaaccttagttggttgcagtaaatatttgttgaatggatggatgagatggttgtagcaatctaagttgctttggatgagattaacactgaaaaaaaaaaaaaaactggttgcctgcaattctgtcagccagtccaggcaatgctaatacagctttgattattatgatcatgattattattttgttttgaaacctttttcagaggccaagcatgctggggacttgagggacataaaaatctttcaactgattatgccacctgcaaacaggataagcctgactttctacctcacccacctcttgctatcacagatatgaatcaacgaacacacaaaaaaggttttcaattctccctttggaaagagggcacatttaatattctgagtcaggcaaggaaagactctagccacaaagacagctgggaactcaggtccatagcaggcacccaggacggaggtgaagagaaggcgcctccctgtctggtgacagcagctggggcccttgctgcctccctccccacaaaaatccagttgggaccagtgcatgctgggaatctgcctgcctgacagaaacagatggcctcaggtggtgactgatctcttggtgacactaactgcatagctgctgctttactcatgaccgaatgagacacgagatggcggaggtaagagttggttaccttgccgtctcctcctcagctgaaatgactcacattgctgtagcttaaatttcagtccaggctctctggactcggggaatttctttttgctcatgctcctgagaaccagagttctccaggaacatctgtagtctctgtcttcaatcaaagcatttgagagatgctttatttttcccctttcctctgtacctgtcacagaagggggcctgtctgaataagatggcacataatctgctgagtgcagcaacccctctgtgcagccttgaggaagaagacaaggcagtcaaagtaccttccatcatttcctggaaaatgtgtcggtagcttggagaggcagagtgggagatggaagtaacactgcatgaggagttaggtggtctatgttcaggggccagggttgtcacttactagataggggacctttagccagtcacttaactccaatggccttctgcttcatatcatctcttatgtagggtggtgggactggattaaggacagcagatagattagctgtcagtcttactgattggaagttgctgtccagagtacagtatgggggatggctgggaagcccatctcagctaagtgagaaagagcagtcaactattggtatttgccaagtgtgtgacagtggcacatctgcctgctattatgagacttgatggtcatttctgcctctgtggttttatgattccaagtgtcctgcaagtgattctagagggatcatgaaacattttctggtcttaataattactcagggatctattaacaatggtgaggaacatactcacaaccagactttcattgagagtttaccatatgtatattatatcacttaaccctcatccttacggatagggaggctcaggctcatagtgattaaatgacttgccaaggtcactcagctaataggtgatggagctggaattcaaactctggtctgtctgcctccagaaccgaagcgctgaactgccaccctatactacttcccagttggagaatacctcagtacagtaattagatgccagtgtgtatggctttgcctatcagtacacagaaatcagaaaggtgattgagagattcattaatgcctccttgcccagttcttttgagcatatcttatttgagaaaggtgcacgtgaccttgggtcagtttgtctaactctgtcagtctcagttatcttatttgagaaatggggctatagcttttaagttaataatccagataaaacatcctatagtgccccagatgtcagtagcactcagtacatgttcatattatgttgccccaaggtcacgtggctgggaattgagctgaggactgcccacctccgaagtctatgatggcaccttttggttttggtacaagtgagtcctgagtggaccacatggcagcattagaggtgcttttgaatacgaaaggtggcgtgaggatccctctcacttatgtctgttctgttgtccagaacttagtgaaaatcctggtccttacccgctagagtgaaaaaggaaggaaaccttaccattctttctgtgtacctttctctggctggggctttctctggtctaggtgtgctcagcaaatatgacaagtagcaggccactcattttgaccacgcccatgtggcagacagctttcttcactttcacgcaaatgaagtacaagacaatcacatgtatggctgcactgaatgtaaaagattaaagagaagtgatatgccaaatagatgactgggagttgacgtttagcaaagtaaatctcttggtggccctggtaaagttaatttcaataattctggttttttttttcatcttagaaacttagaggttaaaaaataataaatatacatgaggagatttagagtgtatgtggaaacagagatcttcggaggacaagtgggatatttctttatagaaagagttttccctcttgatttttttgcttggtaagtttctttcaaatcaactcaattcatttggtgctattgcttttcttttgtgaaaacgattctggggatttgatcaaaaccgacatgaaaatacaaccctcaaatggtaaatatcagggaatctggaatttgcattttctaggctaaagtaatttactggccaagtttgctgtctcctcactcccccaacacatgtacaactcttaaatctcattcccctttaggctccttctctctcagtttatttccagcacacatgcatatgcatccatgcatacacaggtgtgcacatatgcatgtatacacacacacagacacacgacacacacgtgacgcacatattttactctgtgctaataaataggccagtattggctaggctgggcctcaggactgtctggtttaaatctaagctgcctgggagatctggagtaataagtgagtgacaacaggtgcagattttgttacacccttctgaactcagcccatagttctttctttgattcttttcacccaacacccttgcttcaattgtgtccaataaattttatagctgcatgatcctgtttcagagctgaagggagatttttccctccacttggctaaatggtgcctaagtcaaaacaccacttcctgccccctcctcacactttaagaagtaataaggaataaaccccaggccataagctgttgctgggtcctgtatcttcagttttgcatgtgaagagctaattttctggtcccattttagaaaagccaagaattaacttgcagagaattagccataattggggagaaaataattacttggctttttctgccctgtgataactggagccactggcaaatctttcacagcagtgtcaacgcctacttctgtttaaaacaaagtattgcaccaggggccttgaaagtcacatctgaatgttctctgtggtacattttggtccaaaccaccctgaatattggagttggattcatttcatgtcttttttggtgtaaaatcccggtgcagggagacatttcatattacactggaagacatgaatgtcttttgcaggtgtcaggtatgctcatgggccctgcatgcatacttaaggttgggtccaattggatttttttaggagcagtctgtggtctaagctgagaattttttctcataagggcccattttcctctagcatttttctgttttgagactttgcccagctgcctctattccctagtatgtagacttaataaaaaatctcttggttcataataaacatggaaaggagatggtacacgttttccatttgctagtagaggtttacctgaatacagttggtcatatatctcagtgtcgtcagagtacaacaaaatgtcatgccttcccatgatttcagacaccactcttcagtaatgacttatctgaatatcagccctgtacctctcctgagctccagccttaagggcacacttttcattgggtagccctacctgctgacccatagacaccctaggctcaactcattttccctaaataaatttgcttttctttctgtgttttctatcatggtaaaggtgctgtgatccaataactcaaacaagaaaccttgatggcatgccttccatatccattactgttagctaagtgggggacaatctatatattgcctcagatatcactgggatccattgccctcctaactaggctccctgggtccagtcatctttgcctttcctccaacttctcccccatgtcacctacctcctcttttctctacccccaccaaaacagtacttcatacatccctagtattgtctttaaatgtaaatctgatattatttaactatttgaattctttagtaacatcccactgctggcaggaaacaagtcctaacttcctagtataaggaatataaggtccaatgtgatccagctgctccctgactctccagtcttacctcctgtcacactaccatggatcaagccccatggttccctttattctctttcaactctgtattttcgcatatgtgactttcttctgctagtaatgccctttcttaattggcctgtacctttgactcctacacttctgtattattaggctatagcactagatgtggcttaaataagttagattatttgtttatctgatagtccggacgtagatgctttccatgagatcatccaggaacccaggtagcttctgcattggactgtgcttaacatgatgcccctttctgcatgatccaaagtggctttcaaccacagcttccttcaaggcagcaagatggagaatagatgaagaaggaacacaccttctcccttttggtgctgtgactaataagaaatatatttttagtttctgttccaggtttgtgacacagagctcctaaaagccttgtaatttccagagtgatcaacattctaggagtatcttttgttgtactatttagactttgactctggttcctaacagagcttctaaatcccttggggtttcctaagcgatagagcatcttttgctttaatgaggcgactcttgggctcctggataacttcagaatgggagttggtcagaatgggacttggtcactagaaagaccatgtgatggatagcagctcagaattttcagccctactccccacatccacccaatccaccaggaggggagagaggctggagattgagttaataagcaatcatgcctgtgtgatgaatcatccctaaaaatccctgaaagatggggtttggagagctcccgggttggtgaacaagtggaggtgcctggagagggcatgaaagctccccaccccttcccacataccttgccctatgtacctctttgtctggctgttcatttgtatttgtattctttataataagccagtaaatttaagtagagtgtttccctgagttttgtgagccattatagcaaattatcaaacctgaaaaaagggggttatgggaacctccagtatgtagctgatcagtcagaagtatggaaggcctagacttttgattggcatctgaaatgggagcagtcttggattgaagccttaacctgtgtgatctgcccttactccaggtagttagtttagaattgaattgtgggacacctggttggtttctgaagagttagagtattggttagtgtgggaaaatccctcacacacgtgatgtaaaaattgtcatgagtatgcagaaaaaagtttttcccctttagtggcagtttccagagtttgtaaatatctctgcttcccaatcttttgtgcctcctgtctgtctggtactccacctctgtagtaatggcagcagcagcaattctagtagtagtcacagtggtgtttctctagtagaagctgtaatagtagtaggaagaagaggtgtaggagtagtatcagtatcataatttcccattcctagtttcagaagagattgaaaggctaagtgacatgcctgaggtcacatagttaataagtaaacggcaaagctatcgttctgactgggagctctcttacttcagagctcaccactagactgtgggtagttttcaatccagtcacactaaatgccagttatttccttacatgattacctctcccacaagattcagaacttcttgaggaaaaggacatatccaactgacctttgtatctgtagagcctagctccaaggctgggcgtatccatcagttttagacattgaaatcagggtttcttaaccttggcaccattgacattttgggccagataattctttgttgtggggctgtcccattgtgcatgacaggatgtgtggcaccatccctgacttctacccactagttgccagtagcacatatccccacccgcagccagataaaccaaaaatatctccatgcattgccagctatctgctgggagacaaaatgtccctgattaagaaccactgatttaaattaaatgaaggccaaggagccttgagtagtgttcatatccgaaaagggcattttcagaattgttcaggctgctggatctctcaaagatgatgatgtattttccaggcctcatgtgtctggagcacaggttgcctgtggtggtggctgcaatgatctcagtgtgccaggccttcacggggaataccagagagggtccctctggagcagctcttactgggtcatggagaccatctgtctggcatggtaccacctggcaaaatctctttgccttaaccaaaaatatgcttttgtaaatttcctggcaaagcaggggctgcattctgtttcctgatttctctcttttatttccagatgtgtcactggtgacacatagagcccaatgagaactctgttggaaactcaagtttctcattcttcgccagctccgttgtcatgattttcccaccgtctaagccagtgtaggttacgttacccacgtgctggttagtgcttggatgtcagttttcctttttaaattctagatctgtagcatgctttagggaggaaactttatggcttattacacaaatggagttaacccttccctgctttgcagtgtttttgttagtgacagagacatgaattcaagatctgccatttattatttgtttcattttggacaacatgcttagcttctttgatccttgatttgtttaccttcaaaacagagtaacctacctgtcctgtctacctccatgggattattattaaaacacaataagataatctgctcaaaaggcttaaactccctagtatgatttactatcagtataccttttgcacccaagaaaactctacagtatcattgttcatgggcaccaaattgtaagttcagttaaggcagactttgtgtctttttctgccagtttctaggacctagaaggtattcagtaaatatatggtgaatgacagtatgaaaaaaattgggaagtcagattctgtggttcattgtaccagtgggggctggagggaggtaagtgaatggtttgtgtggctttgtgtcatttgtatttgtgacagacattccaagcaatagcattttcaagggttcacaagtgagtgcctgcagaggcaggacacacttaacactctggcagatatgcgacaagacagggtagggaggggcccaagggaactagagagggcatacccagctgtcttagtcattttgggctgctattaaaaaatgccatagactgggtggcttataaacaacggaaattatttctcactgttctggaggctaggaagtccaagatccaggccccagtttattccatgtctggtgaggactcacttcctggttcataggtagccatctcctctgtgtcctcaaaagacgggaggagtaaatgagctttctgggatccattttacaagggccctacttcttcatgacctaatcacctcccaaagccccccccacctccaaataccatcaccttgaggattaggtttcaacacaggaattttgagggggggatacacacactgtctatattgccaacctaaagacattcacagttacacattttgaagtctctgcatcagctaaacaaaatatgtctttgggccaatttaagtcttcagacaaaaatttacaactccttattgacagagtacctaatataaatactgggacagatgcggggcagataaagatgaggtgctcaggatccggcagcagtgatagacaggaaattagtgagacaatgagaatatccaagatacatggagagcttagcccagcactgtccaatgtcctttacaaatgacaacttgtatttaatcctcacaacagcccaatgtgagttagtggatattatgtcccctgttttataatgaggaccctaaggcacaaagaggttgatattttgccagaggctttgaagccagtatctggggaataataaaatgcaacgtgtatgtccaatgacaaaggaaacacagaagccccctcttagatctcactacttctactcctgcccctccagcccctccatttgaagatccctgagggatctgaaaatgcaactttgatcgtggcacagaccagtcctgaggttggtgcagtgacatccccatgccacagaggccctgtgccttctggacgctgcctctcttgccagccttgcccgcccctcatgctctatgctccacttcacttgcccagacagacaagcactttgcccctttgcagccactctcccctttgcctgtgtctccttgttatgcagggcctttcttattcctcaggcctcagatcaatgtcacctcctcagagtgggcctttgctgcccacgctgcccaaagatggcctactgggtcactttcttctttgccacttgcttatttccttcctcacgtgtgtgcctgcgtgtgtgtgtgtgtgtgtgtgtgtgtgtgtgtgtgtgtgtgtattttctgatgcctccacttgactgtaagctccaggagtgcaaagatttttgtcacgttcactgctgcatcccattgcctgagacagtggccagcatgaaggagatacacgagaaagcaatgtgtgtgcactgagtgagcgagcacatgggaggagctgacttcatggggcagattcagtcagagagactgtggctggcctggtgtcacattggtgagaagtggcacagtcgggatttgaactgatcatgacagcatctcgcttgaatcccatcattgcctccctaccgcgctcaggttggactccctggtgtttaccatggacaatgaatcttgatgtctggcccctgtagcacttctagcctcttcaccctcaattgtctgcacatcctcccttgcccctttctatctgcactgacttcaccgtccctcagtcaccccaccttctttctttccctgctcttccttatgttctcttcccacggcaggcaccctctgcccttctgtttcatggggctgtctcttcattgtccctgaaatttgaacttcagtcctcctccccccgcaaacttcttccaagcccatggactagactagaaccccctcaagtgcccctcattgcatttatcatggttgtaactctatagttatttttgtaatttattgtcttttctggcttttctgcccatggcccctacaacaacagcatgttcatctcattcttcttctgccctggctcgttaggtaggaggtgcttacataaacgtttgtcaaggaaatgaataaatgaataaataaatgaataaattgctggatgaatgaatgagagtaagtgaatgaagagttcctgaatttgcttttatgccacctcccttctctgggaaatttcacacaggataggatttctctggcatagagcaacacttctctttgtagatctcagcctgtgcctggagactgggtaaagttgaatgacggggtgcaggaagccttgtgttgtcttgtcacaacacaggaagggaaagtactttggcttttactgttgtaaataggactaaaagtagctcttcgggggtgatctttgtttaccactgcctaaggccactgtccttggagaaaggtcaggaggtgggtgtttacaagttctgtccaaactctcccatgacactatgccacaggccctcatttccctgacccattgttaattagagcagaggaggaacttcagatgctgagtttgtctttgaagaaggatccagaccctaggatgtcatcctggagactttgctcttccttatccttcatacctggtcctccaccttcctgacagtttctcttcttcctcatggttattgggagatagaatgggtggcagatttttattgtttcctgaggagccctgtgctttaatttccattatgtgtgaagatgtctgccatgaccaccaggttgggtgttctgctagattggtgtttgggagccagttgtagacagagtcaaccagaatataaaaagtgtgagtgcagagataaacccactcctgccctataacgacagtaacaaaactggcccagtggtagagctctcatcacaggccaggcactgcgctaagcacgcagtctgcacccctttagactggcccattctctggaaagtttcaaacatacacatcagcaaagagtataatgaaatcctgtgtacccattacgtgtaggggctgaaaatgtatttgccttgatcctgctttcaaagcaatgggtctagtgactgctttgggggaggagttagggaagtgcttaactcatattaacactgatattataaatttacagaatgcagctcgctctggagattatatctggttatatatgtgcacatatcagtgattgctatagtcccctggtaaggggatatatatttaacttaaaatgttctgtttggagtttttacataaatgtcactaaatacatgaatatttcagacccccttcccagtctagagtagtattgggttaagggaactaactgttttgagggaatctgagccaatttagtctggcaggaaaatcatgtagtgaagtagtgaggcccacatggcctctgaccagtcagggagagatactgaagttttacaagagaccatttaatgagagattatccataaaacttgatgcacagatttcaggagaagtctttttagtacttatgtgtgtgtgtgtatgtgagtgtttaaatgtggcaggctaaagtgaagaaatacgactgctactgatagtagctattgtttattgagggccagtatatgggtcagttgctgtgccaggaggtcctttgactacagtctattcctcaccaaggcttttagttcattgttattaccaccattgtagatgtgagaacatggagagtttcagagagttgcccaagactattcacataacaagtggcagggctggaatttcaatccaagttagcctgtttgcaaagcctttgccctttccattagactacatagcatcttaaaatattctggctgcttacttgagaggtaagtatcagttgggaacttactcacttccttctttgtttcaatatacaacccagaatgctttacaaattctgcagaattagccagtgctcatgtttaggcatatcatagattttttaaaatggctaatgttgctgttcctctccttgtgctttggaaaaaattttcagagtccgatacctattgtgacaacttttctaaacactcaaagtgccaagttcatcttgttagctgttcttccaccaggcaatcaaaactcatgttagttccctgtggattcattatagtccccgggaaaccaaaagttttgcctgtgtttggcacataccagttaattgcctaaattgtaacttctgagtattaggaattatcttaaaaactaataccaaaatttggtatgatgtatttcaattgagggggaaaatatttggaaatgaatttattttgactctggggtaatatcttttgcttcacatttagaaatttacatactgggttacttccatgacctaaaacaacttccaagttttcttatttcctcagtacccctagctttgttctggatgaggccagtctctgttccaacgcatgatttaaatatacacggttctgcatctttgtctataatgtttataatatttactatctcatgaattttttatatctacttcataatctactctctccctctatttttccttgcacttgacagcccaactggatgttgtctcttaattctttgtcacttcatggcagtttataattctttaatgttacttattatatttcagctacactgcagtaatggatgggcccattttctctcctccagcgtactgaatgggactgtgtcttgtctccgtgtgcctgacaccttgcatggaatttgcacctcatagccgctcaatagattttaattaattgaaatttaaaagggaacttgtgtggttttgtttaaacaagaccataaattagaaacaactattttcatgaatttgaaattcccagaaacattattctttaatactgtacttttgtcgagactgaagagtttggctttatagtaaatgaaatgaatcacagaatcattgaaccagagtaacaacaatactaataaaaacaccagaaatcatctgtgtaatccattcctctctcttaatgccagacagttccccagccaccttaaaatgatagaactctcctttccttaaagatccttttaaagaagactgtcatcttttcccattccacatcatcatgtcttctagccctacaagttaggcagcttctcctcagatgatcgaaaccctcccttactgaaatttatgcttattgctttcataaagatgaaaagcagctgcttttaactgaaaatagttctcttcctaaagatggttattccattattccatatccttctcttccctaggcataattttcctttccatctgacattcctttttgttctatatttccaaaccattgaatactactctctcaacttacggttttttgcctaagaaaacttggactgggtgtgattagtaagtgatcgttgattttagatgtactgagaaatatgtctcacaccattaaaactagtcgatccagccaggctggtgggtaactggaatactgtgacctcaaatgatatgtggtggtatcttttaaagcctgccatcaaccattcccatctcagtttctccagttgcttaatttataagacataatttatttgttataaactgctttgcaaggttcaaaaaaaaaaaaaaaaaacggaaatgatacacaagagaattagattgaatttaggccattttttccccctcatatctggtttttaaataagccctaagagtgctctcaattagaaaaacacatggtaattctaaaggagataaaaaaggaacatgtacactccaagtgcacttttatcttttcatatttaagaaaccccacaaagctccttcttgcaaattaaagaggatagcaagcaggcagctttctttcctcatttagtttagcaagcatattgatttacatttgagtaggggcctctgatctcttttgtttgtgggtggctttgtttgtttttaatatgaactcatttaaaaactaagcttatggactgagttgcaaaggtagagcttcagtccaacactcaaagtagtcttcctatgcaaaaataaaatagatatttatgtatgtggtagtaggtcaaagaagacatcagtgataactattgattcagtaaatattaaacatctactatgtgtcctccttactaggaagactaaaatgtagaatgtaccatccttgcatctagtgtgcagtgtagtatgggagagagaaataatttagcaggtgatcataatgcaataaatgctatgataggaagcaattaaggcacagtggaggggcgaataacacacctttggatgaattcccagaggaattgacaccagaaggtgattaggatttaccaaggttaagaaaggtgaaggtgtttcaggagtgcgttaccaagtacagaagtgaatggaagtgtgacccattcaagatactcttgagtttgtttcagccagagaacggacaaacaagggaaaacttaagtactctatcctgggttcctcaggatgcacactttaaggacgttttgcgtttttctctggtatttatttattgaagttctcagaacctccacagagctaatttctgtagccttttgtgctcccataaagctttatatatgtacccacatttaaaactttcttacaatactttttgcatttcctccatatgtctattttcccatctactctctgagctaatcaagggagaagacctagtactcacgtctatctatctgcagtgccatgctgagtgcttgcagaaatgtgtttgggaatcagtgcatctctctatgaatggctagagcattctaagtggttttgcttctaactgtgcaggagggcacagtttgggcccaatattggtttgcaaattcaagataagaaccaagaatttgattcttaactcaattttatgttgacttgagcaggctgaactgggttgcttatgccattatttcatttagttcggataatggctatcaaattagctgacaacccatctcagttccctgtagtattcttagcagtgtcttaaagtgggttttcatttgaacatttctttattatattttctttctcagaagtagccaagagatgatgatgatgttgatgctggggaaaacaatggtaacaagagcagctgctttttattgggtatgtgctatgtgaattaaccctgcacttaaccttttaatgaatttatgagataattactactgttaccttcttaacagatgaagaaaatgaagagcaaggaggatatcttactcactagtgaatgatggcttcaccatgtctgatccaaactgtactttgtaatgccttcttcatagcagcactaaaatctaaaagtctggaagagtctttaggagatcagttattccatttcacatctgggggcaggattatgcttgaactgaatgccttggtccactgcctgaaatgtatcctctacaacctttgtccacctggtgaactcctactcatatttcaggactcacaattcaagctgctactcccaagtgaagcttccttaatattcccaggtagagttgccctcttcctctgttgttcctcttaaatatcttgtatttcactcatgaaattcaccaatcatgcagagggtatgtttctagaggcagtttgtatagttgtgaaaggtatggactctgcagctaattgtttgggttccaactctagctctacccgtattagctaaataatatggtgctctcttcccctgacagactgttaatcccttgaggccagataatatttacaagaatttcttaaatggctaagtcacaaaattgtcatgttttttaccttaatagcaagtctgaatgtatcctccttctgaagagctgatgtattgtttctgctggtttctgcatcttgatccctgaaagatattgaaaacctaattttaaggccattttcctgtttgtttgtttttgtttttgtttttgtttttgtttttgttttccatttctgtttcctttccctcttttcctgtccttccttagagacaggacatcttgaaaggtacgaaatcttcaggtctgtacttctacttcaccaacttccttttaatgtttttacctctttgtcttgtgtggaaaatcttaatctgactctttctgctttgtgtcaaagggatactgttcatgttaaaattctcagctctgagaggtatgtgagtaggccgttccttgggtgatgggacagttgacatcatatctgagaagagcatcaccatggtgccctttacttatggccgttgtcatgatgacagtcatagccacctggagcacagtggcctgacaaagacaggaataggaagagggaaataattcgtccaacacttttgtattttgcacaatgggaaaagagtggcatcatttctagatcctaaaccaaaattgatagaaaaagaagactagaatgataagatctgctaaatattctcagggggttgaagtatcaaatatctgcagatggtatcactgagcaaaatcaaggagagcagtttaggatttttagtatgagggaaatgataatgcttttcagtacttcttagagttgtcagtgtctcataaaagataaagaatatttgttgagtgaccacaacttgctgggtactgggctacactacagtatagtatagttattactgagaatttgtagagataatcctagcttatcaaggaaatatttgttttataatttgttcaggtgcttatttatattgaagaatattctcaagttaagatgatttttttagatactccagaggccagaattaatcataaagggccctaatagccaaaaagaattgaaatgcactaggccaattggcagacactatttcagtctgctctctttcatcctttgccaggaattgtacattatctctttaaggcagagcagccttggatgaccatatattaatatgataacttgcttttccttgctccccaccccccaactagtggctttagaatagctttgctatttttcacttatttcttggcagtagcactagatcccaggcttaccgattatgcacactttagataactttgggtcagctcagtactgaacaaatggcaagtcaggaatgccattaagactgaagaatgttggaagataaggattatatagacaccactgtccttatacacactgtgttgtcctgtaattggataggccaaaatgagttgacactggaagaggtattttaatattggagcttataaaatgtttagaaatgttttcctatctgagtcagactgagataggtatgtatgttttctgtctcttctgagtgacactgggaaatagttatgattgggaataggccttggtaccaataacctcatatatacactagggtagaccttgcagaggaagctggcaccagggcatgggaccgtgaagcaaaggggttcagaagaactagagagtggtccaataatgagtcttcagatggccagaggcaaaggctgagatcaagcctcaggtccaagaagccagaatcataagcctgaaataattgagtgagaaacccaacattactagaatggagaagaggctaggggaaaggcaggagcaaacccaagggctgggggtctgaagatgttaccatcacaaggcagccccattttaatggcctctagccacagggtttgccattaaaaactgtaggagtagacagatgcttgatggaaacccttgaccccgggtctttgctcccttaatgaaggaatctaaggcaaagtagagattctttttttaacatttaaactttatttttaattgacagataataattgtacatattcatggggtacatagcaaagtttccatacatataatgcatagtgatcagattaattagcatatccatctcaagcctttttcatttcttcgtgttgggaatgtttaatatcctctttctagtgatgagaaactgtataatacattattgttaactgtagtcatcttacagtggtatagaacagggctccccaaccccatggggttctataccactgtaggatgactagggttaacaataatgtattatacaggtactggtctgtagcctgttaggaatctggctgcacagcatgaggtgggcggtgggctagtgagcattaccacctgagcatcacctcctgtcagatcagcagtggcattagctcctcaaaggaacaggaaccctattgtgaactgcgcatgcaagggatctaagttgcacgctccttatgagaatctaatgcctgatgatctgaggtggcacagtttcatcccggaaccttcctcctcgcaacccccacccatggaaaaattgtcatccacaaaactgggtcctggtgcccaaaaggctggggaccgctggtataaaacagagtttatttctccttatctagttgtaattgtgtatcctttaacagatctctccctatctttttacatgtcctttgataccataagctctatggacaccctataatatttcttcattatacttacccttcatagtaattactagagtgagctcttcatggatttttctcttttactagactctaagctccacgaaggaagagataatatctgtgcctggtacatagtaagagcctaataaatatttttggaaggagggagagaaagagggaggagggaaataaatggctcttttgctccttttcttcatgccagggcaacactcagcttctgaggtatgcacagcaaggatcttgctgagatgggtgtggccacttgcttgcctcacttccagccctgggcacatgcagttctttctacctggtgcagtcctcttcctccctgctctggcacttgcctctgcttccacttctgctgctgcttctttttctagtctcctgcagcctaatcatcctcttgacacattctttctttaaccatctgaatgccttcagtatggttcctgtgagctctgaatgttctggaagccattgttttgttttgataattttgaatattttactcttgctcattatggattaactttacagctgaactctcaaaaccagacttcattttcccaacttgagagaacatctcattgttgtccctgtgtccttgcctatggcacacatctcccgaacacccttttttaccagaacatcctcacagcaaacctaaggcagctaactgctttctacagctctgtgtttcttgacctcttccatctgttttattttcatatttttcctttgttaaaaaaaggagataacagacaagaaaaacacgagaaattaaatacctcaaaattactgtacattttcacttggagtaaccagtctttgtaatgttttgtaaatatctttccctgagtgggcctgaataagcatgtagttaacaagcatggacttttaattgatcagggcaggttttgaacttctgtcctgctctttcctaatgatacaacctccaatgacttaacttctgagcctcagtattctcttctgtgaaatggaaatactaataatagtatcctcacaagtttgttgtgatattcagtaacccacataaaatttctatgcataatgcctggcgtataataggcactaagtaagctgtcacttgttttctttactttcctgctttctctcatattgcctctaattagtaccgtccttattttttaggggacagatccaaatccgtgaatccaggggcttcatcacgatcttggaatattttggtggcaactttaagatcttttgttttctgactcttagatctctttcttttggtggcatgggaaaattccctcaactcgattatttattcagttctttcatgctccccatattgtcatggccacgtttgaatcatgttatcggcaagtctgaccgaaaaagcaatttaatattgccctgtgttgcatcattgcatatattatttcagcctgtcacgggcctgtcagcaagtcttgatgaagtacagagccaatagtaacaggcctgaaatctgacagctctttaacagaagctgctccgattggtgcagtggtatttcttcagaaattaaggccttcttggtctctttgttgatacaattagcaatccaatctgagtcattttatctcccaatgagctgtatcttcagggctggtaattcagtctgttgcatggcttggaaaaacagagccatcagaggcctgtgatgtaccaaaggctgcagccaggaatatcttggtaatttatccccactctcagctctaattattctgttcttcactggctggttcgattgagactctccaggttcagccttccctaagcagagaacaaaaggtttcccttgaaagttggggcctggcaatgtcagtacagtgagctgcgtataaataatgcagcagtgccggcttcatttttataaaatcttggtggagaaatgcatgagaatgatcaggcccctggaactcagcaggcatgtgcttttgatgtgcgccttgctctgagtaaaagcaggagaataaaaagttcttgtttgtgctgaggctacttcatggtctctggctcggattttggtgaccctttcgctttgtttctgatagagtctggaggctcctacctaactaggaaaactctgatatgtatatagagggaaataccttcagtaactattttctgattgaaactaaagatgatgaaaataaagatggtgattatagtagctttacttatattagctttacttacattccctcattttaatcttcctaaggttagagttatctggctaggctattttctctataccttctgctctcccaattagccttatatcttttcttttttctggtcagattccccaaaaataaatattcagggtgtgaacctagcagccaaagctctgggagctgagtcggggaaaggagcttgagggctggcctgcaaaaaagcagatactgaatcagtctctttttgtcaagatactctacccttacctggaccttttatcgcaccctatctaagggtggatgctatggtttggctgtgtccccacccaagtctcaccttgaattgtagctctggtaattcccatgtgttatgggagggacccagtgggagataattgaatcatggggctgtttctcctcctgctgttcttatggtagtgaataagtctcacaagatcagatggttttataagggggaaacccctttcacttggttctcctcctctcttgtctgctgccatataagacgtgccttttaccttccaccatgatggtgtggcctccccagccacgtggaaccatgagtttattaaacctctttttctttataaattacccagtctcaggtatgtctttatcagcagtgtgaaaatggactaatacattggaccttagtacttttcttccgtagtgtgggagaagtagtaccctggttgctaatagtgaggtcacatgggatctaattacttcctaaacatactttttgtaccatctgctgtttttagcctcatttttatcctcactttcaggggtggtgagcaccaccacctcctgaactttttgggtctctgtagggtaatcattttgcttctgggtttttcctgctgctatttaggttttacctttctcaagtctaccaagagagttactactaccatggtttttggcttttagattttcgatgctgtcatcttctatcctgttctcattgtgggtttttgcctctttgaaacattcttgtacaaccattttgttggaatttttaaagggcacagagttcaacacgtgtagtcaatctggcatctttaatcagaagcctctttttgtttttgtactttttgaaataggaaagaaggtctgctagagatctggcatgcatttgtgtcttgggcagtaggtggtgggaggaatgtgaggtaggcaaaaccaggagagcattgttggaaggctctcctggttccattgaggttaatggtctatgcaaggaacccagtgttctgcttcatgcactccaggagtctaacttttgtctcttctccagcctgcatacagagcagtatctaaagatctaggctttataatagaagccattaaaaaatgattaggaacctgaaagcttccttctataactgagatctgaaggtttttattcattcacttaattaacatgcattgtgctctcaaaatttgccagagtagcattgtgcttattcatccatataactggatgaaaaaggcagatatggaccctgctgtgggaggttgtggcctgaccttatatactgaaatttccagaaggccagatagagcatcaagaaataaaataaaataataacattcttttatgataatgagatagatccttcagtgcctcctggtcttccccactcatacacactcatgcctaaaatagtccacggttctggactcctttagtgggccagatcctttcatcaccatgggctgctgagaccactggaatttcaggcaaacctataaaacaggggcagctttaggtgaccacattctgtcatgaatccttgatttcatatacagtttttgcattacatgtttgctagtcctaggccaaaacaaaaggagaaaagatctaattttagctgagttcgagttgcctttctaaaaattatgatttcttctttatgagtctttttggtgaattgacccttttctcaatatgtaatgtacctgtttattcctggtaacatttcttgttctgaagtctactttgatattaatatagccacctcagcttattatttgtatctgcatgccttatctatttatttattttttgagactgagtcttgctctgtcccccaggctggagtgcaatggcacaatctcggctcactgcaacctccaccttccaggttcaagcaattctcctgcctcagcctcctgagtagctgattacaggcgcacaccaccacgcccaactaattttttttgtatttttagtagagatggggtttcaccatgttggtcaggctggtctcgaactcctgaccttgtgatccacctgcctcagcctcccaaggtgctgggattataggcgtgagccaccacacccagcctgcatgccatatttttgcatctttttactctttatcttgcatttttatattgaaaataagtattttttgtttgttttgttttgttttgtttttatccaggcactgcgactcacctcacacctgtaatcccagctactcacaaaactaaggcaggatgattgcttgaggccagcagatggagaccagcctcagcaacatagtgagacccccatctctaaaaaataaaaaaaagaaaaagtaatctgggcatggtggtgtgtgcttatagtctcagctacttaggaggctcaggtggcaggattccttaagctcaggagttaaaggctgcagtcagtcctcatcatgccactgcactccagcctgtgtaacagagtgagctcttctctaaaaagtagaataagtttcttttaaactccatatagttgggttttatttttattcagctttattatctctgccttcgcactggagattttaggtcatttacatttattggttgggttttaatctattttctttttctgtcttccatatattctatataattattcccttttcctgtattctccagattacttaaatatttgttagtattccattttatctctaaaaagttttacctcttgccagtttctaatatgcgtctttcacttatcacagtcgaccttaaaataattttgatgcctcattatatataatacactttcatatcttcctgtgatttgtgctattattctcatatgatttgttcatgcattggattgtataaagatttaaattcaatttttttaaagaaatttatgtctgttgtatttactcacatatttagcagttctgatactcttcattcctttgtgtgtgttcacatttccatttggtatctttaacccatgtagtttctgcatgaattataaagtattctccttctccctcctcctatatgagtatacagaattgagtttgttgattgtattaacaccctttaattccccagtagtaataataatagctattattactcttatagtttacatgtctcttcacattctgaaagtacaatcacatatttaaatagaattgtcttttttcaaatgctttttaaattttagaagctcttgtttcatatatttcatactacattgtttggttcataaaatattatgaatggtagttttcttggattgagcattttgtcattatgaaatattcttcttttccttgttaaatatttttgatcttgattctactttgatacttatattgtcatttaaaaatttttttgtttgtatttgttgtagaacatttttgaaagaaaactgaatcacattttaaaaaatctgaattataaacaaggtatatagcttaattttaaccacagtatgattaatcttatcttttaactggttgtggaattcagcccattcacatttgatgaaatactgagataattgaccttatttgttccatcttattttgttttctatttatattacatcactccccattccctttcctttttgttttgtgtggtttattggtttcactggcttgttaattttttctttattcccttttattccttgttactttgagagtcctactaagtgttttgtttctactagtggttacattctcattccttataaccaacaataaacttatgttctgcctaaacatgtatatgtatttcaaggaacgttttctgtgtaccccttctctagactcttacttaatatttgcttacttaatgtttattttcagttccagactgttactaagttttttttgttgttgtttgttttttttttgtagaacagcaagcctattgtattttaagaaaactcaatattacagattcctgcttacattattattatccacttagatttcaatacgtatatgcatatatttttatgcatatatgtatatgtttaagcatattatgcacatacatgcatatatatacatatatgcaggaaagagacacacagagtgagaaagggtctcagtgtctactggttcctctagtctttgatttccaccatattgagaaagctgctctgaatcaattgttatttggttatactctttctcaagtattgtcctcagacagtgcttatgagtttactttttgaatccttgtgtgttgaaaatgttttttttgcctcttacagctaaataatattttgtctgggtataggattctttaatcagtttctcgtaatagtttgtacattattctagtgtcttctacattccagagttgtagatgagaattcccttagctaggattaatcctttgtaagtaacctattctttctgtctggaagcttgtataattttctgtttactcttgaaattcaagtgtttcctggatttacttcctggacttaatgagacttttaatctgtgggcttaaatcttacttcagttcagtataataaaatacctagccctgtattcatttaattacagtatctccctcatttgttcttttctttttttttttttattccttttctctctcctaaaaaacacaaaatctgttctggaatttctgttattctcatgttaggcttctggaatctgtcctccaagcctcttatctcttccatcattatgtcaatctctttgtatctttgctacttgtagtagcaaagtgggagagatggtgaaatgaatgagcaaagacagttactatggtaaattaagataaagataaagataaaattcagatgtcatatgtcatatttcatttacttggtcttccagagcattaatttgattttcattagtgtcagtgattttttagttcttctgtggaaattttaaacgtaaaatcagtatttatacttccagaaagaattttttgcattcttctgatttctcattgttttcatcattaaaagattctaccatatttttcatcatttctacttctgtgggacttgcctcttgtagatgttctatgtggtctctcaggtgaactactcccattaagttagttaatgtttttgttttgcctactcattgataaatgctattttgactttcatataggtttttagtatctattctgcattaacaagtctgaaagcagtgaaaggtacatcagttcctgccctggcacttgggctggcagtcacccaaccggccaacagcaagtggccccttctttcttcttagagcacccttggtggaagcagcactcctctctagctgccaatcttagaagcaactcagactgccagtgtagccctgactctgtagggcccctatctctaattctaattttacaaacctttgggtgggggtgactagtaggtacagcttgcctaaaggtgaatagttatccaaagagggcaagttgctaaaacacttcaggaaatgtcaaaactggtcttaatagaagactcccggaggggtaagccctttgttctgctgctagtaccttgcctttacccactaataatatgaacaaagtcctatgttttctttccctcctggagagttttggagtacctgtggcttcaattgtactcactaaactttaccagttctgctgcttaatagcacgtccatattacccatcagtttgatttaaagaaactcaatgaattggaccctaatattgtttgaataatcccaatgaaggagggagttgccagaggcatctgtagccataaaacttctgtagtcatcttcactccaggcatactctcttattttaacttcttgtaaagaccaagacatccctaactttccctttattggggaaaaaatctgcttggaaaaacttagttatgctgtgaagtgttgagtttttaaactattgctgtattatgaaccacaaccaatgcttgttagtttaatacagtaatcatttatttgactcatggacagctcatttaggctgtgctgtcctaggtgatccttctggtctcagttggactcactcactggagtcttggctgactgatccacgttgatccaagacaacctgggggtatctgatccagattgagctcagctggctattgccctgctccatgtttctcttatcctcctcatgggaccagtggactagcctagaatgatctcatggcagtgccagaggtgcaagagaacaagcagaaacacatagaatctcttgaggctcagactcggaactggcatgcagttacttctgcttccttattttggctaaattcagtcatgtgacagaatcagaagtcagaggtaaggaatcagaatcagaggtaggaaaggaagccctgcctacaatgtgggggacaggaggaggagggtgcagtactacaaagttacatggcaaagagtgtgggtatgtggagacatgaagacttagggccatgaactcaacctttatcagctgttgagaaatacagtgcaatattttaaacttacaatggtacctcaagagagagagccacgagtttagcttggaggtagtagagaaactttcacagaggagctgacattggaactggaccataaggacaacctggagtttaccaagcagacaaagataggtgaaaggagtaataatccattaagatggaaggagaagtcaaagtagaggcccagcactctacagacaagaatgggacatctggggatttaggagttaccctgtgtgattggatcattggaaacaatccttctatactgccttttgctccctaatattactcttgccagggagctatcgtacctccccaaaagttggaatttcagatgtcatatgccaggaggagttagcatattgtatactcttcagaacatgttacataggtgggctgccttctccacttattagagatgtatgttgcttaaaaaaccgtgaataatttagcatgtttctagaagtgcttgcattccttcagtatatttatgccacttagcatagctcaatgtgttctgtgatctgtgccacatgtaaaaaaatcattaatgataagtgacatttgttggctttcaaaagacatttaagcctcactcagtgctacctcctctatgaacccctccttgatatttcctccctgtctcccaccagattatgtcaggttcttctgctaaaggctttcatttctccctctacttccttcagagtattcatggctgtttgttagtatatgattttagttgtgattatttgatcaatttctgtctccccaattaaactttcagcttctgtgactgcaaaagactagatattttgcataccactggtttcctggatcctagtatagtgccaggatcatagtaactgaatattaaacatttattaagtgagtgagtgaatgcatgaatctatgtgagtgactgaatgagatacatctagactattgtccttgtgagataggttttgggttatctttaaaattgcatgagctcccaggtttaccatttacctaccatgtaatggacaaacgattcattctttaatgtttccattcagtcagtgttcattgtggcttgtcataatcctgaatgtgaatgaggtatttgtgatacagagaagagtaaggctgattctgggctgacggagttgctggtttagtgggagagatggtgaaatgaatgggcaaagacagttactgtggtaaattaagataaaggtatgtccagattggaacttggagaagaagcttttcactcagtctgcccttcattggggcttcctgaaaaaggacaatctgagctgagtcatgaaggctaactaagagttagatgcataatggggatgactgttccaggaagaatgaagcaaaagggttcagtacacagggaagtgggaaatcaaggctcactatagcaaactccaaataattcagtattgcagaatgagaaggcaagggtggggatggccagaacggagtgactgtggagatggacacagtcatatcacaaagggttctttaagccctgctgtgcattggactttgtcctgaagttagagcgtagcaattgaaggatcttaatcagagattgacataaaatattttattttataaagtttgccctgggtacaatatggagaacagattataaggcaataagactgtaggggagcaatatgaagaagcagttacttacccagcatgataagggctatggtagaagacatactccatgctctgggaaatcagaagaggagtgcctaacccagaactggaatctcagcctaggctaaagtaagagtttgaattatcatggtgaagaagctgggatgagttttcccaacagatgggggtagggcaaaggcactgaagtatgtcagaacatgactttcttcagagaactgtaagtaactttttattgttagactacagaatattaagggtaaattgagaaatgtagctggaaagcatctagcgttcaagtcttcctcctattaaatattgccttagactgggatgaccatactctttattatctccaccagacactttaaaaacttttttttatcatagaaacttttgaacatgtagcgagagtagtataattaacacccatgaacccatcactctgtcccaacaaccacccatgaccaatcttgcccttagccacatgccatttacttctccttctcatgttgcttaaagcgcattccagataccatgtatcttatacaaacattttcagtatgtatctctaaatgataaggagccttttgttaacataaccacaactaccaatatcatatctaaaatttcataatttttttatcaaatagcaaggttataatttctaattatctcacaaatgtcatgtaaacgtagatgtaaatacgaatattcatatacagattgtttaatcaggatccaaataaaggactgaaacttttttttttttttttttttgagacagagtctcaccctgttgcccaggctggagtgcagtggcacgatcttggctcactgcaagctctgcctcctgggttcaagcaattcttctgcctcagcctcccgagtagctgggactagaggcatccaccaccaagcctggctaattttgtatttttagtagagacggggtttgaccatgttggccaggctggtctccaactcctgaccttaagtgatctgcctgccttggcctcccaaagtgctgggattacaggtgtgtgccactgtgcccagccagggctgagacttttgaaagtgaaggaaggtactatccataattaacaggtatccatggagactttttacctaagcagggatgtgtcattatctacactggcttattccacttctttaatacctctgcagatacctggacgggtattttgcaaaatataaaggaagcctcactcatatggtcagttctatctatatctcttctattttcttaggtctctctgctccctggtgtgtaagtggacatattcagcagagaaaggctgggacgacagtttctggaaaatgattggtttggaagactttgttgcagataattacagcaaaataggtaaaagaataaaacatctgtagagtgattatgtgcattggaggatcttgatgggtttgttgttattgtggtttgtatgtttcttgtttttgtatgcatgaaaatacaggaatgaagttcactttttccaagacaaatgagttaattatgatgggtaggccatgactagtaggctcttgccttaagatttatatgaactgagtagagatacatgctatgaaaatctgcattgaaatatagaatcagaaattgcgctgggcatggtggctcacacctgtaatcccagcactttgggaactgaggcaggcagattgcttgagcccaggagttcgggaccagtctgggcaacatggtaaaaccccatttctacaagaaaaatacaaatgttagcctggcctcgtgcatatgtctgtagtgtcagctactccggaggctgaggtggggggattgcttgagcctgggaggcagaggaggttgcagtgagctgagatcgtgccactgcatgcagcttgggcaacagacagagcagaactctgttttgagggggaaaaaaaaatgggctagactgaggaagatatttgcaaggagcagcttgggaatagcatactcaaggggctgtgtatggactgcttccagtcagtactacgaaaataattttacaaattaggttcacaggacaaggcaaggctgtgaacaggtaaaaaataaagctaaaagatcaatattagaaaatctagaaaaaagcagaaactagaacgagtcagtggctcctaactaaggccttagggtctcagactaaggccttttatgtgggtggtaaagtacatcttctatgtcccaagcacatttctctgtgcttgtatgtaccttgttttatatatttctcacaactactgacaaaagcactgttgcatgtttacagatgagaatcagagagattagtaaccttgcctaacctggcatggaatcaataaatggtaagtcaggatcgaaattctcccaatgggaggacctagaaggaactaatattttactggaacacaaatttcagcttcagttacctaatggtttaagtgatttgtaaaatgtatatgccctccaaaaaattagttgttttttgctgaatattcccatggtatgttgttaaacatagctttattagtgtatatattgattacctgtatatgtgtcttgattcctcactagactgtgagctgtttgacataaggattttcacttatttacctttgtatttcctgtcctagcacaaggcatggcatattttcatatctcagtgactttttgattaaaatattgagatgcttggtactaggaggttggcactctttcctttaaaaatctgtaatgatatttactgattttaacattatctttggcaattgggtataacttcaactctgattttctgattatttttatatttttctgctcctctttcctgcctcacacatgacacatgtttaattagtatattagctctgctaacgtagcagtatctacaagaaatattcattagaagtccataatgttaatctagcagaaaatttccagagtaactttattagattttttccctgttaagttaatggatttttaatggatttcctaaggagacatatcattaagcagaatattgctgtacgtgaattagaacttacccatttatcaaaattaattgtgtgatgtttcctttgattttcgcttctggacacttgagcttgtagtttcagtctgaacccaaagtagaagatatttaagaggctgtttattctcagttgtgactttcagaaactcctctggaagctacctctagacattctttagcaattcttggaactatgaaagatgaatctcagaagcctccctatgaagtgttaaacatttccagtggcctcattgcccgtcaagatgtgggcaatatagtgtgaaaccttttagcagatttgagcattgagcgtcctggatttgagcattaatacaattaccataatttgctccatgtggagcttttagccaagcctttaccaggcttcctgggcccatgcagtaaataaatgctttccctgaaaactgaacacctcagcaactgatggtcttatggaggaatatttttaaaatgaattatttatgaagtgtaagttaaggatcaaatgcaatatttatatggtgcatttcaaggacaggagaaaaaatttacagggttttaagtaataacatgcaagtttctaaagctaaaatgttactacctaatgccttctttcaaggaggtatttggatggcttggtttgggaacattcacaaagtaaggaaaaatagttttgtgcatcaaaagaatatagtagaaatttctttacaattgaatagaaatttctttacagttgaaactgtacaagttgacttaatgttcagaattgatggagaaaaatgaaacagattttgggtaggagattatatagccctactgacaaaatgatctgtgttcaatgaaatgatccaacaaactgatctgtgtcaataaattttgacctttaattccacatgaataattccccagttacctatctaatcctaaacatctatcaaaagcaaacaggaaggaagagatcagcagggagaaaggaccttaggaagataagcaacatcccacctgttctaattgattatccaggtgccatttcagcatgccgcggttgcctttttaattcctgggaaaatctctttgttctactattggggtagcccactttatgaaaagtcgtgtgtgcaacatggctgaattatagagtgattatctgcattactaacagggtttgtcatataaagggattcagtgtattagcttatagatcattcctttatttgggaccagggaagccaggcaaagaaaaatgtaaattccaagtccaggaagttagtaagtgttaagtgagaggcagaaatgaagataaagggcaggagacagtttcttgagtggagggaggctgctttttaaatgggtttcctcgacccgggaagcacaaggggtgggggagatttccctttcctagacaagggaagccatgacagactgtatctggaaaatcgggacactgccgcccaaatactgggcttttccaacagtcttagcaaacggcacaccaggagattatatcctgcgcctggctcggcgggtcccatgcccagggagccttgctctcactgctagcacagcagtccgagatcgaactgcaaggtggcagtgaggccaggggagaggcttccaccattgctgaggcttgagtaggtaaacagagcagctcggaagctcgaactgggtgcagcccaccacagctcatctaggcctccctgcctctgtagaccccaccactgggggcacggcgtagctgaacaaaaggcagcagaaacctctgcagtcttaaacgttcctgtctgacagctctgaagagagcagtggttctcccagcacagtgtttgagctctgagaactggacagactgcctcctcaagtgggtccctcacccccgtgtagcctaaataggagacacctcccagtaggggccgactgacatctcatacagctgggtgcccctctgggatgaagcttccagaggaaggatcaggcagcaatatttgctgttctgcagtatttgttgttctgcagcctccgctggtaatacccaggcaaactgtctggagtggacctccagcaaattccactttatgaaaattcctgcagctgaggaacctggctgttagaaggaactctaacaaacagaaaggaatagcatcaacatcaacaaaaaggacatccacaacaaaaccatcatcaaagaccaaaggtagataaaactataaagatggagagaaaccagagcagaaaagctgaaaattctaaaaaccagagcacctcttctcctccaaaggatcacaattccctgccagctacggaacaaagctggacggagaatgactttcacgagttgacagaagtaggcttcagaaggtcggtaataacaaacttctccgagctaaaggaggatattcaaccccatcgcaaggaagctaaaaaccttgaaaaaagattagatgaatagctaactagaataaacagtgtagagaagaccttaaatgacctgatggagctgaaaaccatggcacaagaactacgtgacacatgcgcaagcttcaatagccaattcaatcaagtggaagaaagggtatcagtgattgaagatcaaatgaatgaaataaagcaagaagagaagtttagagaaaaaagagtaacaagaaacgaatgaagcctccaagaaatgtgggactatgtgagaagaccatatctacatttgattggtgtacctgaaagtgacgggaagaatggaaacaagctggaaaacacatttcaggatattatccaggagaacttccctaacctaggaaggccaacattcaaattcaggaaatacagataacaccacaaagatactcctcaagaagagcaaccccaagacacataattgtcagattcaccaaggttgaaatgaaggaaaaaatgttaaggggagccacagagaaaggtcacattacccacaaaggaaagcccatcagactcaccacggatctctcagcagaaactctaccagccagaagagagtggaggccaatattcaacattcttttgttttgttttgttttgttttgttttttattttattgtattttatttttttcttctattattattattatactttaagttttagggtacatgtgcacaatgtgcaggttagttacatatgtatacatgtgccatgctggtgtgctgcacccattaactcctcatttagcattaggtatatctcctaatgctatccctccctcctccccccaccccacaacagtccccagagtgtgatgttccccttcctgtgtccatgtgttctcattgttcaattcccatctatgagtgagaacatgcagtgtttggttttttgtccttgcgatagtttacagagatatagatcaatggaacagaacagagccctcagaaataacgccgcatatctacaactatctgatctttgacaaacctgagaaaaacaagaaatggggaaaggattccctatttaataaatggtgctgggaaaactggctagccatatgtagaaagctgaaactggatcccttccttacaccttatacaaaagttaattcaaggtggattaaagacttaaccgttagacctaaaaccataaaaaccctagaagaaaacctaggcattaccattcaggacataggcatgggcaaggacttcatgtctaaaacaccaaaagcaatggcaacaaaagccaaaattgacaaatgggatctcattaaactaaagagcttctggacagcaaaagaaactaccatcagagtgaacaggcaacccacaaaatggcagaaaattttcgcaacctacttatctgacaagggctaatatccagaatctacagtgaactcaagcaaatttacaaggaaaaaacaaacaaccccatcagcaagtgggcaaaggatatgaacagacacttctcaaaagaagacatttatgcagccaaaacacacatgaaaaaatgctcatcatcacttgccatcagagaaatgcaaatcaaaaccacaatgagataccatctcacaccagttagaatggcagtcattaaaaagtcaggaaacaacaggtgctggagaggatgtggagaaataggaacacttttacactgttggtgggactgtaaactagttcaaccattgtggaagtcagtgtggtgattcctcagggatctagaactagaaataccatttgacccagccatcccattactgggtatatacccaaaggactataaatcatgctgctataaagacacatgcacacgtatgtttattgcggctctgttcacaatagcaaagacttggaaccaacccaaatgtccatcaatgacagactggattaagaaaatgtggcacatatacaccatggaatactatgcagcctatacaccatggaatactatgcagccataaaaaatgatgagttcatgtcctttgtagggacatggatgaaattggaaatcaacattcttaaagaaaagaattttcaacacagaatttcatatccagccaaactaagcttcataagtgaaggagaaataaaatcctttacacacaagcaaatgctgagagattttgtcaccaccaggcctgccttacaagagctcctgaaggaagcactacacacggaaaggaacaaccagtaccagccactgcaaaaacatgccaaattgtaaagaccatcgatgctaggaagcaactgcatcaactaacgggcaaaataaccagcttacatcataatgacaggatcaaattcacacataacaatattaaccttaaatttaaatgggctaaaggccccaattaaaagacacagactggcaaatatgataaagagtcaagacccatcagtgtgctgtattcaggaaacccgtctcacgtgcagagacacacataggctcaaaataaagggatggaggaagatctaccaagcaaatggaaaaaaaaaaaaaaaggcaggggttgcaatccttgtctctgataaaacagactttaaaccaacaaagatcaaaagagacaaagaaggccattacataatggtaaagggatcaattcaacaagaagagctaactatcctaaatacatatgtgcccaatataggagcacccagattcataaagcaagtgcttagagacctacaaagagatttagactcccacacaataataatgtgagactttaacaccccactgtcaatattccacagatcaacaagacagaagcttaacaaggatacccaggacttgaattcagctctgcaccaggcagacctaatagacatctacagaactctccacccctaatcaacagaatatatgttcttctgagcaccacattgcacttattccaaaattgaccacatagttggaagtaaagcaatcctccgcaaatatgaaagaacagaaatcacaacaaactgtctttcagaccacagtgcaatcaaattggaactcaggattaagaaactcactcaaaactgcacaactacgtggaaagtgaacaacctgctcctgaatgactactgggtaaataatgaaatgaatgtggaaataacgatgttctttgaaaccaatgagaacaaagacacaacgtaccagaatctctgggacacgtttaaagcagtgtgtagagggaaacttatagcactaaatgcccacaagagaaagcaggaaagatccaaaattgacaccctaacatcacaattaaaagaactagagaagcaagggcaaacacattcaaaagatagcagaaggcaagaaataactaaaattagcagaacggaaggagatagagacacacacacaaaaaaacccttcaaaaaatcaatgaatctaggagctggttttttgaaaagatcaacaaaattgatagactgctagcaagactaataaagaagaagacagagaagaatcaaatagatgcaataaaaaataatataggagatatcaccaccaatcccacagaaatacaaactaccatcagagaacactataaacacctctatgcaaataaactagaaaatctggaagaaatggataaattcctggacacatacaccttcccaagactaaaccaggaaaaagttgaattcctgaatacaccaataacaggctctgaaattgaaacaatatttaatagcctaccaaccaaaaaaaagttcaggaccagacagattcacagccgacttctacaaagaggagctgctaccattccttctgaaactattccaatcaatagaaaaagagggtatcctccctaattcattttatgaggccagcatcatcctgataccaatgcctggcagaagcacaacaaaaaagagaattttagatcaatatccctgatgaacatcgatgcagaaatcctcaataacgtactggcaaaccgaatccagcagcacatcaaaaagtttgtccaccatgatcaagttggtttcacccctgggatgtaaggcggttccacatatgcaaattaattaacataatccatcacataaacagaaccaaagacaaaaaccacatgattatctcaatagatgcagaaaagactgacaaaatttaacagtacataatgctaaaaacttaataaactaggtattgatggaacatatctcaaaataataagagctgtttatgacagacccacagccaatatcatactgaatgggcaaaaactggaagcattcccttggaaaactggcacaagacagggatgccctctctcaccactcctattcaacatagtgttggaagttctggccagggcagtcaggcaagagaaagaaataaagggtattcaattaggaaaagaggaagtcaaattgtccctgtttgcagatgacatgattgtatatttagaaaactccattgtctcagaccaaaatctcctcagctaataagcaacttcagcaaagtctcaggatacaaagtcaatgtgcaaaaatcacaagcatttcctatacaccaacaacagacagacagagccaaatcatgtatgaattcccattcacaattgctacaaagagaataaaatacctagaaatccaacttacaaaggatgtgaagtacctcttcaaggagaactacaaaccactgctcaatgaaataaaagaggacacaaacaaatggaagaacattgcatgctcatggataggaagaatcaatatcatgaaaattgccatactgcccaaggtaatttatagattccatgccattcccatcaagctaccaatgactttcttcacagaactgaaaaaaactactttaaagttcatatggaaccaaaaaagagctcacattgccaagacaatcctaagcaaaaagaaaaagctggaggcatcatgctacctgacttcaaactatactacaaggctacagtaaccaaaagagcatagtactgctaccaaaacagagatatagaccaatggaacagaacagagccctcagaaataacaccacacatctacaaccatctgatctttgacaaacctgacaaaaacaagaaatggggaaaggattccctatttaataaatggtgctgggaaaactggctagccatatgtagaaagctgaaactggatcccttccttataccttatacaaaaattaattcaagatggattaaagacttaaatgttagacctaaaaccataaaaaccctagaagaaaacctaggcaataccattcaggacataggcatgggcaaggacttcatgtctaaaacaccaaaagcaatggcaccaaaagccaaaattgacaaatgggatctcattaaactaaagagcttctgcacagcaaaagaaactaccatcagagtgaacaggcaacctacagaatgggagaaaattttcacaacctgctcatctgacaaagggctagtatccagaatgtacaaagaactcaaacaactttacaagaaaaaataaaacaaccccatcaaaaagtgggcaacggatatgaacagacacttctcaaaagaagacatttatgcagccaacagacacatgaaaacatgctcatcatcactggtcattagataaatgcaaatcaaaaccacaatgagataccatctcacaccagttagaatggtgatcattaaacaggaaacaacaggtgctggagaggatgtggacaaataggaacacttttacattgttggtggtagtgtaaactagttcaaccattgtggaagatagtgtggcaattcttcaaggatccagaactagaaataccatttgacccagcgattccattactgggtatatacccacggattatacatcatgctactataaagacacgcgtacacgtatttttattggggcactattcacaatagcaaagacttggaaccaagtcgaatttccaccaatgatagactgaattaagaaaatgtaacagatagacaccatggaatactatgcagcaataaaacaggatgagtacatgtcttttgtagggacatggatgaagctggaaaccatcattctgagcaaactatcacaaggacagaaaaccaaacacggcatgttctcactcataggtgggaattgaacgatgagaacacttggacacagggtggggaatatacaccagggcctgtcgtggggtgggggaatgggggagggatagcattagaataaatatctaatgtaaatgacaagttaatgggtgcagcaaaccaacatggcatatgtatacatatgtaacaaacctgcatgttgtgcacatgtaccttagaacttaaagtataataaaaaaaaaacatacaaacctattatacttttcccttcttaaatttatccctttctttgatcttacatttccctgtaggctacatcttgttactgtaattccttttattatagagttactacaataattgtcttttactgcctctacttcctatgatgacattacagttacactttcttccccaccactgtactgaaattaaaaaaataataataaaatggatttcctccatccctatgagactgtactttgggtgtcagatgacaaaaacacagtcacttggcacattttagatactgatgaaatattcattgaatgagttaatatatgtttgaattaaggatttgattttttttaagtcccttgttggcttcaattgtttctttcttgttttttttgttttgttttgttttgtttttttttgagatgtagtttctctcttgttgcccaggctggaatgcaagggcatagtctcggctcactgcaacctctgcctcccggtttcaagtggttcttctgcctcagccttccgagtagctgggattacaggcatgcgccaccatacctggctaattttgtatttttagtagagacggggttgctctatgttggtcaggctggtctcgaactctcgacctcaagtgatccgcccccctcagcctcccaaagtgctgggattataggcataagtcaccgcgcccgactggcttcaattgtttctaaaccacaatggactttcgtaaattttttgaattaaataatactactagctaacaggcaatgaatgtatttccttaattcagtgttcactgtcatctttcatgaacaccttctacataagacgggtccctgcagaagatacaccctatgttgagtgatagtgcaattctatttcattcctgtagcaaatctctcagagacttttctatcttaggaaatatcacagactccttcacagaaggaaaacaagaattaatcttagaaaggttgggcatttcactttttcatagagtaaaataaactgaacattaaatgaagctacactttagatatttttgtcatgtaggctaaaaatttgtaagtaaagaatcttggctgggcgtggtggctcacacctgtaatcccagcactttgggaggccgaggcaggtggatcatggggtcaggagatcgagaccatactggctaacatggtgaaaccctgtctttattaaaaatacaaaaaatcagccaggtgtggtcgcgggcgcctgtagtcccagctacttgggaggctgaggcaggagaatggcgtgaacatgggaggcggagcttgcagtgagccaagattgcaccactgcactccagtctgctccactgagcaagactctgtctttaaaaaaaaaaaaaaaaaaaaaggatcttgactaatgaactaatgataggtatatgctggggacataaatgtgccagtgaacagagccacctcaggcaagggtgcagtattggctttggtcacactgaatcaaagttcagggatcttctgcctcttgttggaatctggctagactttggaacctgcacaatactgacttatccacccactggctggccaagaagctgagacaaagagaaaagaagccacctatacttgcctgaagcaagctgcacttgatcagattgattcatgaactcagagcccacaggcctgagtacaggtggctcaagaagaaagtattagttcttttctgctgctataacagaatacttgaggttgggtgatttataatcagcagagattaattcagctcatggttctggaggctgcagtgcccaagggtgccgataacttctgggcatctgataagggccttcttgctgcatcatcccatggcaaagggtgcaagagtgtgggactgcacacacaagaatgagagagggcaagagggggcttggctttatcagaagtgcctcctaagacaatggcattaatccattcatgagggcagagccctcatggcttaatcacatcttaaaagtctcaccttttaatactgtcataatggcaatgaaattttaacatgactttttgttttaatatgctgagcttttattcatatttttttttaacttttaagttcaagggtagaagtgcagttttgttacataggtaaacttgtgtcatgggggtttgttttacatattattttgtcacccaggtattaagcctagtacccgttatttttcctgatcctcttcctcctcccaccctttgtcctccaccctcccaaaggacccagtgtgtgttatccccctcattgtgtccgtgtgttctcattctttagttcccacttaaaagtgagaacatgtgatatttggttttctgttcctgtgttagttgctaagaatgatggcctctagctccatccatgtccctgcaaaggacatgatcttgttctttttttatggctgcataatagtccatggtgtacatgtaccacattttctttatccagtctaccattgatgggcatttaggttgattccatgtctttgctattgtgaacagtgctgcagtgaacatacatgtacatgtgtctttataatagaatgatctatattctttggggtatatacccagtaatgagatttctgggtcagatggtatttccatctttaggtctttgaggaatcgccacattgtcttccacaatggctgaactatttcacactcccaccaacagtgtatcaacagcgtttaagtattcccttttcttcacaacctcaccagcatctgttattttttgactttttaatagccattctgactggtgtgagatggtatctcattgtggttttgatttgcatttctctaatgatcagtgatgttgacctttttttcatatcaatatgacttctgaaggggacattcaaaccatcacagagatacatgccaagccttcatgaactccacttcaggactgtggccccacttcccatttaacacggcctcatggatactattatacaatcttttcagtctcagggatccagctaagtgattccttctcccatggatggaataagggagattataaaagcaggaaatgggagcattcacaccaatactacctcattttaggggaaagaagaggaaattcccttttgtaaacaaaccatagaggtttccaccaacaacatgcattatgtccagtgctggaagcctgaatccagtgatgccatccatagttgtgggtgttgtaaaatccttttagagcaattaatattcaatgttctgaatttttccagtaaaagtggacatgtttacaaggattcatgtcttcattctttatagtgtgtggcttgtttttcattttgatttgaatgagccatataattcagttatttctgtcctcagagctttgctgaagtgctgcttcatctttgtatcatgtgatataagtgccaattttactaatttatattgagagctctggagaaatctttaactacaggtaatcccagccttttctaggttaaatggggcccatcacaccattacctcccctctcctgagggaggcttatatggtttgcctctgcatccccacccaaatctcatctcaaattgtaatccacacatatatcaagggggagacttggtgggaggtgattagatcctgggggctgtttccccaatgctgttctcttgatagtgaaggagttctcagagatctggttgtttgataaatgtttggcattttccctgcttgttcttgctctctcctgccttccttccccctctccttccaccatgattctaagtttcctgaggcctcccaagccaggtggaatggtgagtcaattaaacctcttttcttcataaattacacagtctcaggtatttctttatagcaatgtgaagatggagtaatatagaggccatccctgtgggtactctggactgagatttgcttttgcctgtcaccctgagcttttgatcttaccttatcctcttattatccttctcttccctgtctaagtgacagaaccaggtcttcacagtacttgaaggcaagtacctatcctctgagtattgatgccttattttactctttagtatcgaatttctgcctgataaagaatgacttggaggtctccatgccagttagccatccatccagtcatgcatccagccaaccacactccccaagtgtctcctgtgtgccaggtgctgggctaagtcctagggatacaaaagtgaattcatcatggtctatccctttggggatctcatgtctactaggggtaggggcaggtaaatgaatcagtaatctcaaggtttttcagtaactctacagatgtccaagatgccatggagaagcagagcaggcagtcactggcactggtggtggtatcaaggaaattttctcatgaggtggcattttatgtgtctggaaaattggagtggtagtgagaagtgacagcgtgctggcagtcctcacagccctcgctcgctctccgcgcctcctctgcctgggctcccactttggcggcacttgagcccttcagcccgccgctgcactgtgggagcccctttctgggctggccaaggccggagccggccccctcagcttgcggggaggtgtggaaggagaggcgcgggcgggaaccggggctgcgcgcagtgcttgcgggccagcgtgagttccgggtgggtgtgggctcggcggaccccgcacttggagcggtcggccggctccaccggcccagggcagtgaggggcttagcacctgggccagcagctgctgtgctcaatttctcgaggggccttagctgccttcccgcggggcagggctcggaacctgcagcccgccatgcctgagcctccccctgttccgtgggctcctgtggggcccgagcctccctgacgagcgccgccccctgctccacggagcctagtcccatcgaccacccaagggctgaggaatgcgggcgcacggcgcgggactggcaggcagctccacctgcagccccggtgcgggatccactgggtgaagccagctgggctcctgagtctggtggggacatggagaacctttatgtctagatcagggattgtaaatacaccaattggcactctgtatctaggtcaaggtttgtaaacacaccaatcggcaccctgtgtctagctcagggtttgcgaatgcaccagtccacactctgtatctagctactctggtggggacttggagaacctttgtgtggacactctgtatctagctaatctggtggggaggtggagaacttttgtgtctagctcagggattgtaaatacaccaatcggctctctgtatctagctgaaggtttgtaaacacaccaatcagcacccagtgtctagctcagggtttgtgaatgcaccaatcaacactctgtatctagctactctggtggggacttggagaacctttgtgtctagctcagggattgtaaacgcaccaatcagcactctgtcaaaacagaccactcggctctaccaatcagcaggttgtgggtggggccagataagagaataaaagtaggctgcccgagccagcagtggcaacccactcgggtccccttccacactgtggaagctttgttctttctctctttgcaataaatcttgctgctgctcactctttgggtccactttgcctttatgagctgtaacactcactgcaaaggtctgcagcttcactcctgaagccagcgagaccacgaacccaccgggaggaacgaacaactccagacgcgccggcttaagagctgtaacactcaccgcgaaggtccgcagcttcactcctgagccagcgagaccacgaacccaccagaaggaagaaactccgaacacatctgaacatcagaaggaacaaactccggacacgccacctttaagaactgtaacactcaccgtgagggtccgcggcttcattcttgaagtcagtgagaccaagaacccagcaattctggacacagtagtttaccagaaaagaggggaaatggcttccaaggcagaagaaacagtgcaggcacagacatggaggcatggaagagtgcagagtgtgtgtgaactgttgggtgtggccagagcatagtggacctgaagcaaggtggagaggagtagttgtgggcaagatagagtttatggggggctagtttctgatggaacttctaactttcctcaaagatggggccaccgattagagactcaacatggcaggagtcactctattcctttcaagagatggttctaattactactcctgccaatgcagtaaataacacttgagggcagtaggagccattttagaatatttgtggctcctatgaagctgtttgtgtgtcggggcaggtggcaagcccatttcttttcttttctaaagtcacataccttgccccttagctatcctcccttccataaaggtttgttgtgaagctggaatgtgatatcagatgtcacagggcagtgtggtttacgaagcctgtagaaatgttcttaccaactgtaagtacaccttggcacctggaggacaagaatattcactcctgcatcactctgttccaactgtgttcacactccttagattcgcagaaggactgttttcagctgctggcccttccaggaatagccctaaagagccagaagggcaaaggagtaacattgaccacatcatggtgatacaaggtaataactttcagaggttttgctgtggaaatgttcctcctttcaatacggcatctgaaagataattggaagtcccccaaaagtgaggtcacccccaacttctcttcctactgctggagaatcagcgattgtcagagctgaaagggatcatagagattttactgtaatgcactcattttatagacaaaaaactgagactcagggatgtgaggtgaatttccttggtcctgcagcattttaatgacagaaatgagaccagaaaccaggtcttctgactcttagtcctgtggtggttctactccttcctgccacttctcctgtttgagttttttggcaatgtgaggacatttagccaatctggatactgacatttgaatgaagctaaccactagaagaatgtcaaggagggaacgatttacataggtaaatttacccaatccattgtccaatcttcagtcatgcaaatgtaggaactggactttgcccaagtcagagacctttggatctaggaacacactgatcaagcccttaagtgactgatgtagataaacgagaataaataagtaataagttcacagttgcctatggtaatagttaagagattggtcaccagggtcagatggacttgacttcaattctgactgtcatctgtaatgaaatttctgccatatgtaactttgggtgagttacttgatctttctcagcctcaattagtatattatgaagattagtaagtatatcatgaggatgaaaggtaataatgcaggtaaagttcctagcatacaataggtcttcagaaaatgaaagttcttactactataatgattgtccattcctctgaattcagatttctctctaggtgatagattatctgccaaagaccataaccccttgaataatcccaggtaattattgccaacttctagatttggaatttttccttttttctgagcttcttccttggattcacacaacctttttccaaccaagatacaataagattaattagatttctgcttctaaattataatcacatttcataatcacaaaccttccttgagaggcatcttaattggaattaagggttttcctgaattcgtcaggtccacatgactggcaatctttagctttttttccatgaatagaggggtgcatatccacaggcaaataaaaaaaatacaggatatgttggttaacaattaactagttaattaataatggctaatgttcctacagtgctttacaacttagaagagtttttcttttcatgcactattgtgcttttttcttccaccaaacttgtaaaataggtttgatttcagttttacacttggggaagccaggattgatgagctttggtcttttccatctcagtagaaggtgtcacaattctccctgtcattcaggacccaaacctagaagtcattcttaatgcttctcttcttcctcttacaccttacatttaatccatcaacaagtactttctgctttgctccaaagtggacccggaatgaggcattcctgcccctcttcactattagtatcgtagttcaaagtagttttatttcttgctggatttgtgtgctagcctcttaaatggtctccctgtttctgtccttccctctgataatccattctccacacagcagccagagtgatattttaaaaatgtaaatcagatcatgttactctcctgcttaaattcctccagtggctccccattgcagctgggaaaaaaataactccttgccatgttcaacaaagtcttgcgtgatctctgtctgacttttattgcttaccatgcccccacgtagtcaccatccaaccacaatgaccttctttttgtccctcagacatttccagtgtatatagcttttgcgttaactctgccttctgtctggcatggcccttctcaaaatattcacatggtctacctctttctctttgttcagatctcagcttcaatgtcatcagagaagagctttcccttaccacccaaacactctcttctactccagcagtattctgtttccctgttgtattttattcttaacactcatgactatccaaaattaatcagtcttgtctggatgctttataggtattaactcgtttaatgcctttaaccagtctagacaggtactactatattcattttactgatgaggaaattaaggaaaggagaggttaagtaagttgctcaaggtcacacagtaagtaatggaatcagagacaggtctgctccagatcctgcacatctgtccatgtagctgcagtctcctggcctgggctgcgctgatacagctgcagttctcagactaagttcaacaagagtcccagtcctagtccagtgatgcctgaagtcacatgtttcattctgggcctcacattcatgaagaccactgacaaaaaggccccagggccccagatgaaaaacataatttaaagccagtgaatttgagaagcagttgagcagttttgggttttctcatcaaattacctgcccaatgtcaaaatattagtaaattatagatctagattttaattgagtgttgtctgacattcccttcctcagtgctgacttgagattactcaagatgacagaagaaaagtgctgcctcagaggttctttcctccctctctgtctttgaaaaagcacagggagaagagggctgaagatgtgactgtccagtaattggaaccatctcggctcctctgaaattctaggagaagaataagtgaacagtatgatatcttgcaaagcttcatgtgccttaatcacattaaaattcacaattcagttttggatttatttttccttgttttttgaaagttattgacttgggacttgcttctggatctcagttggacatctgacctcatgccattattgtcatccatttagaggtcatttatttcagtgttcttgaaaggcagccattcccagtggttggccttctctattgcatgtgacacatcgcagctcttctgcttagcttttcttggtcacacagctatcaggtggtgactttggcctccaatgtggcccttacctctgactttgtagctcctctgcagtactcttcactctggttctgtggagttttgactccgagatacccatgaccttttaagtttcccagcaccagctaacctttctgagaatctgcatcagagggctgcagtggtcagggtggcaggtcaccagttgactaatggcctcctccaaggtttgctggcagacactgcgttgccatgaaccctattgatcccagaagtttgcctgctgcttagacagtctttgcgggcgtgaggaggtagtgagtcatggagccaccacccctgctacccatctgttcttgtggtgaggagaacaaagatgatctctttgtggtatcataaaacctagaaagacattaaaaattccgttaaattttcatacgcttttagctgttgaaatgtacaatctattatgaggggggaaaaacccactgtaattttccccccactgcccttacttcagaggctacttaagggaccaggtaatgattttacgatgtttattaatacttcatgttctgcttccctcccccattcatttatctttaaattgaaagcacagaaactgccagggatctttaaaatccagagtttttgcaatgtcataggttgttctgttatggatattgtatgtagagatctattgttgactcagagctggggatggggttgggggtggtatttatttttaaaatgcactttggagtaatggaaataacatgagttttggagccagatatacatgagtttgaatcctggccctgccatttactacctttgtgaccagtatcaaacaagttacctaacctccgaaggccactcagttcaaccacttgccagattgggaaagtaatacctctctctgagaatttggatgacctcaaacagagacctctcaatgcaggcctcgtgggaacaatcttatcttatccggatatccagataatttttagtttttcttagttgttctgagtaattacttttattttctctgtctctcgtgggtatcatgtggagtaactgtcaagatatccctcacccctttggttgcttgagaattgacagcatattgaagcctcatctatagtagatttataaactatggtataaagctataacctcacctcaatttattttgttcccatgtttggtttatttaatctttgatcccacttacctcattttatatttgcctactagttataagctgtctgaaacattttataacatagcatgtagaaatatgtctggaacatagtaggtactcaatagatatttggtaaatgaatgaataagtaagcattagagatacagatacaatatgtttcagaggataattaaataaaagagggcaagataatgagtttgtgcctttgagatatccaaataaaaacatagagtagacatttggatctatgctaggaaaaaaggctagaaatagagatttggaagtcataagtgtagatgatatttgaagccatagatatgtgtgagagactctagagggagaagagaaatttcagtactttagaggccaggtagaggaagatgtgcctgcaaaggaggctaaggatgtacctgccaagggcagggagataatgaggagattttacaaggggagggaacaatctccaaggatgctgaaaaaggaagggagataaggactggacactgttcatttgatatagtgactcggggaccttagtgaaagtcacttgcttataatagtgaggcagaagataaaagtcgtacagcagccacagctaacactgagcacagatgctgtgccaagtgcttaatgtggactgttacattacaacaacatgagatgtgtagtcatctcaccccattcccattttttacagaggataaaaatgaggcataaagaagttaatcacccaaggtcatatagctgggttcaagccaagacaggtgtcaggactcagagtcacagttgagaaaatgaagccagaaagtttagataactcaagaaatttggtcagagtgtggggggagagagagagagatggggtggtcactaggggaggaagacggttggaaataggtagagtgttccactgtttggttgattgattgttggaagatggagatttgcttgagcatgtctgattgctgataagaagattctagtagtgagtgatgggttgctgatacccagagagaagggagaatcagtactgtgggtccagagaagacaggcaggattagccttggaatacagactttctattttaataggtaggaagaagacaaaaatggtacagctcatgggagcagcatgtgctcggaagtgggaagttaagggatttcccttcatgaggcttctgttttctttgtgaagtaaaaagtgagatgatcttctgacagagtggtagccaagtgagagagtcagaatctgtaaaaaatggaaaaggtttaaaatagaagtacagaggatcggggaaaagatgattagagaaatcttggaggattatcaaacggtacacagaaccctgcttaggggtcgccatgaatttattataaatctgccctgtggtgtgattttctccagcagcactcagcatctggttgtaagcacacaggaaagggttgttcttttgttttattaatcttaatgaatagcagtagtctgttctgcaagtccttgacaccaccctcttttctatatgctgtatctaatctgttaccaagtgctgtcagtcttaggctccaaatacgtctataattcatgaactctttccacctcaaaatgctacctagcctgtgttcccataatctcgcaactggattattcaacaggcttataacacttgtcattgaatggaaacttgcctttttcagtccatcctgaacactgcagccagcatgaactttttataatgaaaatctaatctaatcctgtgacctcccagcataaaccttctcaagtcttcccaatgcttttagggcaaaaaccaaaaacccgaattatggtctcccctccttctggcaccactgttttcattgatctctgacctcagttgccctcttttggttttctgcacacgacacccttctcaccgcaagatctgctctcatggtcttgttttgcttccagtatcgagtccatgttccaggaagaaggacaaggacaaagggcaaaagtatggactttgcttctgttccagtgttaactctgaaacctcactcggtctcttctgcctacatgtcaatggccagaaccgtattacatactactacctgcaagggaagctggggaaaggtccattttttgccagtcacatttcagccttcaataaaatgagagttgtgttatttaaaaagaagaggaggaggggcactaggtaagcaacctggagtcccaccttcaatgaggaagtgttttctaggtgaagagttgagtgaaggagatgctgacagaagtgacagcatgaatacagtttagtgctgagcaatatgatgtgggaagaaggtgctggaacactgagtttgaggcagggaaaagggagggaggaaacagagaagtaggcagggatcaaaaaatcataatgcccttctattccagctgaggaacttaaacttcatcccgtgtgttagcctctaaatgaggtcttatatgccaggtgatgtcaagcaagatggtctactgggtatagacaaaaatgttggtatttttatttatctccatttttatttcattttgtttaaattctatttttaggtatgcatcttgacatacacacatataatttataagttcaatagtacattatatacaatttataagtaatagctatgttgggagtccatctgaagacttttttcttagtgacttgcacagtcaaaatgtttagaaactattgcattaggcatcagggaactgttaaaacattttaaacaaggaaatgatgtgatccaaattgaatatggtccaatttgccttttctttcccctatagagttctttaaatttttaaaaattttagaatgttagtacttagaaagaaacattagggagcatcaaccctgtgtcataagtaagataactgaggcccaggaatattaaataattagaaccattaatttgtggctgagctggagccccatccaacctgggtctcatcttctcccagtggtcctttgtggccctgtgcgagtgctttctctcttcctgaatgcatgtccctattcttcagcaaatactcttctcatcagaattatgacatgtgggaatcaagaggggagtaaaagggcatatttataaaaaacgtggaaaccaagaaatctgttttgtaaaaatgaatcacctatttagcctcagggttctgttgactctttagctgtcaacatggaagtctctaggtaccgattcctgcaggttctgttttcataatgccagacccatcagcagtttaactgagacataccgttgtacaatgtcattattttaggtattgtatttgcaaggccagcggtctaagtaagagattaaactgaacagatttctgacttggtaagacagagactttctaaggggtacactgccccactttatcttaccccagtgtatatgaagaaacacatgtttacccatgggaatgtgtatgtatttggatctatttcacagagtatcttataaaaaccgacatgaaaagaaagtctgatttatagaatcctatttcctgacattgtgaatactagttcaggactttgctaactactttttgaccagtgtgactgatttatttccccatgccatcatcaacccagctatgcaagtacaggaagacagggtatctaataaccagatggtgaacaagatctgtattctcttgggtatactaagctattctgaaaattcagtttataggggtacagactaagggttatatatctccaaacaaatgtgtttgtcaagttgatgatcatgtttaccaagatccttttatcaccagctgagtcctcttttagtggcttaggtcaccctggaattatttcaaaaaccagcctgatgtttagaacctcctgtgggctcgggcttgccagacacaaacctaaaatgaagcctgtagccttcatggtagcaaactgtaacctcaagcacaattatatgaatcatggacaaatgttttcactttcaagcaagtttttgccgcagcaaaaatgaccacttatctaagaggctgcatatttatatatatataaacagtttttggacataagaatcttgactattatttcccacagagaattacagatttatatatgtgtgtctatgtgtatatatatgtgtgtgtgtgtgtgtgtgtctgtgtgtgtatatatacatatgtgtgtgtgtgtgtctgtgtgtatatatatatatatataaacaccatattctgtgtcttttatatatagtatcacttgattattataattaccatgaagtgccattgttcttctcattttataggtgaggaaactgaagctcagagaggtgaaataacatcacaaagctaagaggttgtaaatttggcacttttaaaattatctagttattacaaaagttgatcttcagatcaacaaacttaactgacatttcctttttgggccccattttctactctgtgaactgaggaggattgaattcagtgattctcaaaccagagcatacgtcagaaccacctggggggattcttaaaacactgattcctgggcctgcttagagtttctaaatcagaaattctctggagcgattaagaactggtgtttccaataagttcccaagtggtggttcccagccacactttgagatccattggagtagatgatctctcagtgtcttccagctgttacatcctggagggtcagcaacctgccatacttcattggtgtgtgaccaaaaatactgcttcttcatggagtgactttcctactacttttgccaagtttgttggttagccaggaaaattctcaacatgaatggaggaaaatgctgatgaaaatcactccttcctgtatttattaactcatttgccagactaatatttactgagtataccctttgcagatattgtgctacatactggagatagcacatgtgaagatactcagcccctgcctgcgagatgcctatcaactatggagaaaacagatgattaatttattgttattactaaaagggaagtgctgagacctatgagaataaaatacttctctaggatttgtgattatgacttcaaacttttcctaaacaggactattttctactgtggtcttaagtcataaattgtctattctctgtatctagttcgattctgttcttagctttttgaggtatttctttattgggacaggtcagtaagtggcattttcatttattttttaccaacctaagcatttccttcctgccctagatgaaaacttagctttgttcaaaatttgcattttcatttttagcctatggtgacagtttaaatcaacagcaaaagcagaaacccttgtctaaagcaatttcctcactgttattccaacttcagtgaaatgagaagtcctggggagatgaattcagactgtcttctctactcccaccccttctcctaacagtttggcttcttgaaaaaaaataaaagatgaaggaagcaggggtcttgaagggaagatgtctactgtaaaaaaaatagggaaaggaaatagtgtactgataatggttatcatttgttgagtgtgcattatatgccagggactgtcgccaaacattgtacatgaattagcaggtaaacttccccagtaaccaatgaggtacaggtaccattattatcttccttttacagatatggaaattgaagctcacagagggtagataactgtcccaaagtctcatggttatttgatggaggaacaggaattcaaaagcaggcctgactccaaaatctcatgctttttaccagtaaattagatctccagtcatttcaatccctgcatttttcatagggatggtgctgactcatttggcttcctggttttctgactcatctcactgaacagggccagatccgatatgtcttctgcattctcccttatatcatctttctccctgctcccttttctattatggtccacctactctatcatcttctttccatgggccttaaaggaataccttcttgtggactgtctctgtgatgcagtagaaatctggtaagcttgccagggtgtaaaaagtgcatttgtttaggactgtaatgtttatttgaaagggactttcaatcacagacatgacttttttatgagcctcattatatatccttgtgattggaaaaatgcatcagtaaataatgcctccatgaagagtcactctcacttgcattattttaaaagatttggtaataaaaagtactcagattattgataatccataattaatatgaagtaaataatgtgtgttttcaaataaaattcaccatgataagtgatgagagtatgggcttttatatttctttgtaagtcagagacttataaaagataggttatccatcactaaggaatatgtagacacattaattttagcattcagttttttttctctcttttctaaaaaacatgattctattcttcaaaagaaagagtggttttattatttttccagctctttaaaatggttcaaaaatcttggcctgcagacatctttttaaaaaatcaatttttcaataatttagagtgaatcacacccataggggggatgtgctttcaaaataattaaagtagaggaggcaggattatagatcttgagaaaatgtgcttggaaaatgtcctttgatttgttgtgaaccccaaagctttgaataaaataggataggactggaatcaacttctgaactttctcactagctagtggcatgttaccagtagtccagagaatgctgaatgcccatctaatctacactgtcatcccttttattaacaaaacttaggcttttagggtacatcagggtctttcattatagactacatttcccagctccctttgcagctacacatgttcatctaagttttggccaatgaggtataagcagatgtgtcctgtgggattcctgagacgtctcctttaaggagatcaggcagtggccatcctctttccctcccctgggtcaggtagattggctggtcaggtaggttagcagtgactttggataagggggacagacgccatactccagggatggcagaacagtgagcttttgtggaacttccataccagccttggattcactacctctggactttgtttgtatgagtaggaaatttgtttatttgtttttgctgttgtttttgctttattagaaaatcactgttttgtagatttgtagctacacttaatcataactaataaaaatggtgactcataaggtttgggaaaacaacagttaaattaaggtagtaagtttagctatcattattgagcacctactatttactaggaactgttctaagatctttatttgtaatagctcacataactcattcaacagtctttctaagagacttacccccattttacagatggtcagtcacagagaggttaaataacttgcccaagatcatacagccaagccaggagttaaaatcttcagtctatctcttaaactttctgtaaatcactgtgatgaagtgacttgacaacattctaaaaacaagtaaaactggacctaaactccaacttttccctatgtaggatacctgtctcctagacttgttgctaattatgttagttggcctctggcacatcacttagagcccctgtgcctcagacttaacactaataagaggcatgggacaatacctcaccattgtttagtatccattctgagcctggcactgtgccagacacacagatgtgtgaatgacagcgcacccagagggagaccatgcgttggtcaaggagacaaggcctgaacacttaagaagagccaaggaacagcaagggaaatgcagaaccacaatgtcactacatccaggagggttcttggtgcttgatatgtggctagcaaccagtgaacatccctggaaccaagtggcaatgcatgttaagtgccctgtgagcaggcagaaataaatgttttgaatcaaaagaggaggggagctttggcatctaaaggattcagggacacatggtgagtgctttggttcatgttggttgtgccagtaattgaaggagtcttgtagttggtaagatttggggaggtgatgggaagttaggctcttcccccttctggctttctctgccccagggctaacagggctagttcctggaacaccgtctgtgctcccctgtcttgggtcctacacacagctacctacctgtcagcttgggatgctttcccagcctttcatcctagctaccttcttatcctcctggtctcagaaaaaaatgacatgacctatatggagtctctcctaagtagaccacatcccacttacttgctctactgtgtggtgaaatcccatcaaaatggaggatatggttccaaagtcagtgcatactgtgagcagtgaatcagccaagagaatccttgaaaatccctgagggagctatctccacagtggaaactgataagctatctccagtaagtctaacacattaattccggtatttcttttttccctgttcgagatagctgtcctattttaaagtctaggttgtatgaaaaaaatctaggttacatgtagccaagctataggttatacactccaaggagtctcatgtacatagaccatgatgggagtgacacacccctgaggtttttcagtgtatatagaactgtacatagtggaggtattagggtcagatgtagcaaaaggagatattcacactaaaagaaaatagaaaccgaagccaacccagggaagagctgatttacactccattctcgggttgagctccctgtgtaggatggtgaaataaatcacttgcattatttatattgtttaatttctctctgcatctccttcatttgcttcctgaagcctatgtacagttgactgtgtgtgtctatctctgcaaactacagatcttcacttcctattataacacttatcacatttgaatttttcatggattgtaattatgggttaaatgtgcctgccagattatacattccatgagggcaggggccatgtccatctcattacctgctgtggcccagcacctgcatggtacctggcacacagtctttccaagcagttctgtcctagacattgttgtggctttcttctcacccgccttcaggaagatccacccaacttctttctcagttactcagcattaagatctgtagttgctgaggcactcagttaagcttagggtggagctaaaacctgcctgggctggtgcttctctgatacagaaacccctgaaactgatgattatccagaaatacttgatctctttgggggcctgaggagctttggaccaccttaactcatcacctccttaagctcccctacctctaaatgctcttctcaccgctcccactcccaccccctcccccttgccccaaggctcctcctcagcccaactaactgaggctctttcacaatcctaaaagcatcatctttgttttaattttttcttttatcttcaaaagcatctaaaagtaaaaacaactaaagaaaagccagaaagtgaatgaagcagaaaaacaatttcagcactctgatacagtaccccaaaacaattttagttcactttgcctttttttgtgccattttaacgcagttgaaaccatgccgtatatgccagtgtgtagtctgcagttttaaggtgacattattgcatattcatattttcatgatattctttagaagcataattttaataatgccataatattttattgaatgctgtaatgatatttttaagccttctattaaggttggacacttaaatgtttacctttttttctctagtatgtaaatattatggtacaaatacacaaaaatactgcagggaacctttttattttctgcatctgacagactcgcagaaatggaattactaagtaaaaaatacaaactctttaaaatagatttttatttcaggtgatacttaatgcatattaagtgtaaaaaacttagaaaatacataaaagtatttcatccagcatttacctccaagagatggctaattttttgtatattttctgtctttttgatgtatgtgtatatgtgtgtgtatatatatgtattatgtatatattatatataaatatgtattatgtatatattatatatattatatgtatctataataaaatttatactgtattgatatattcatactatatatgtatcattactttacacaattgaaatactttatatgcatgttgttaaaactcttcaaatatacagcttttaatttactgtgtaacgatttttaaaacaacacttttcttgtatcatttaaattttttctgatttcttctattttgttgtatttgtatacataccttgtcagcattttatgttattccttaggatggattccagtaatggatttaccaagtcaaaaggtataaatttttaaggctcttggtgtatattgtcaagtttctttccaggaagattttgccaaattgcatttccaacagtccataagattataaagcaatggaaaatagcatgtcctttctgttttaatttctatcttattaactcttagtgaggttgagctttttccttatatgttattcatgtatatcttcttttgtgaattgtctagatacttaaaaggctaagaatatttggaggttatttttaaaaaataattttttatttttaattgacgttttatacatatttagggggtacatagtgatgtcacagtacatataatgtgtagtgatcgggtcagtgtaattagcatatccatcatctcaaacatttgtcatttctttgtgctagaaacattcaatatcctcctaggtatttgaaaggatatattattgttaactatagttattctacagtggtatagaatactagaacttattactcgcatctagctgtaattttgtgttttttaataaatctctccctcttcccctcttccctctaccattctctgcctctaatatcctctactttttacttctatgagatcaacattttttagcttcaacatgtgggcaagaatatgcagtgtttaactttctgttcttggcgtatttcacttaatataatgtcctccatttccatccatattgctacaaatgacaggattttgttgtttttttatgtctgaatagtattccattgtgtatgtatatcacattttctttgttcattcatctattattggatacctaggctgattcatatcttggctattgtgaacagtgctgcagtaaatgggagtaaagatatgtctttggtatactgattttgtttcctttggataaatgccccagtggtgggatcagtggatcatatattagttctgtttgtagttttttgaggaacctccatactgttccccataatggctcttctagtttacattcccaccaatagtgtaagagtcctttttctctgcatcttcaccagcatgttaattttttgtcttattttgataatcactatcctaactgggataagatgatatctcattatggttttgatttgcatttccctgatgattagtgatattgaacattttttcatatttttgttgtccatttatatgtcttcttttgagaaatatctgttcagatcatttgccttttttaaaaaatttatttttaggagacgggatttcactgtgttgcctagactgtagtgcagtggcacagtcatagctcactgcagccttgaactcctgggctcaagtgatcttcccacctcagcttcccaagtagctgagactacagatgcacaccaccatacccacctaattaaaaaaaatttttttggacagggtcttgctatattgcccaggcaggtcttaaactcctggcctcaagcaatcctccagtgtcagcctcctaagtctctgagattacaggcgtgagtcaccatttgccaatatttaaatcaggttggttgtttttttcctgtaccaatggttgaattctctgtgtattctggatattaatgtcttgaccaatgaatagtttgcaagtattttctcccattctataggttgaattttcactgtgttgattgtttcctttgctgtgcagaagcttgttagtttgacataattccctttttaaaaattttttcttttgttgcctgtgctttttagatcttattcataaaatattttccctggccaatatcctgaagcatttcccctatgttttcttctagtagttttatagttgcaggtcttgtgtttaggtctttgatccattttgagttgttttttgcatagagtaagagttgggagtctaacttcattcttctgcacatagatatccagttttctgagcaccatttattgacaagactgtcctttcaaagcccagtgaatgctgttggtgcttttttcaaaaatcagttggctgtagataggtggattaaagtctgtgttctctgttcttttccattggtctgtgtgtctgtttttctgccaatactgtgctgttactgttttggttactaaagctttgtaatatactttgaagtctgaaaatgtgatgcctccagcctgcttgcttgcttgcttgcttcctttcctttcctttcctttcctttcctttcctttcctttccttccttccttccttccttccttccttccttccttccttccttccttccttccttccttccttccttccctccttccctccttccttccttccttccttccttcctttctctctttctctctttttttctttcttctttcttttttgcttaatattgctttggcattgtgttttttgtggttccatacaaattttaaggcttttttctatttctgtgaagaatgtcattggtattttgatagggattacgttgagtgtgtaggttgctttgggtagtatggtcatttaataatattaattattctgatgcatgagcatggaatgtctttccatttatttttatcctctttagtttctctcatttgtggttttccttgtagagatctttactaccttggttacattattgtatttaattatttttgtagctattgtaaatgggattgccttcttgctttgtttttcatctagtttgttgttcatgtataaaaatgctactgatttttcatgtcaattttgtatcctgaaaatttactgaatttgttgatcaattctaagagtttttttggtagaatgtttaggtttctctatatatgtgaccatgtcatctacaaacagggataatttgacttccttctttccagtttagctgttcttttttttttttcttgcctagttgctctggcttattcaaaggttgttgacacatacatagatacctattttaaaagagtggcatgtgagaaaaatacaggaaatagagcccaataagatatgaatatttgaatttgctgatccattctttcatataggactataagatttaactcttaaaacttcaaaatttttctgtatgtactttccatcttgtaaagttataatagacgcgtgtcgttcttattggagtcaatgaattgggctctgtcatttgttgagatatcatccttctggctctggagttctgtaagaaaatgacaatatatttagggtgataaagctaatatctcaagtctcaattgtttgagagccagttatcagattacctttcacttctgttcctatcattttgttaataactattgttcatttatttatgtacttattgtctggtaccccactataatgcgtccatcaagagagcttacatctctctcagtagtctgtttccttcatttcctccaaatttccattaactttttaatctgtttgcttatttgggtttctgtctttcatattaggggctctcttcagatgataaggtgatccttggctgtctgtttcatgcttgagaatggggtactaaaaagatgactgggaactctatacatgcataaggcttatcaacagtggtttgtacttgtacggtgatctggatggcttgtttagaaggggaaatcctctgccagtatttttggatttttttctattagtttaattaacatccccagagcaaaactttcaatctttcaatatctaattgcagaaataaagcctggctgctggagttcaaggggctagcataggaaagagactagatgactccagtagatattatgaaaactttcactaaatcctcctttttcactttaacttttttactttcagctgcctggtatccactatctagatgccttctgtttttcctttccaggtaataaacctcgagtcttttgccaagttgacaaaagggatggtcacaccagtgtcaagtcagtactgagtctgcctttttattaaacaggctttcagccagttttactattttcagtccctctttactctcacttctagagatatcatctgccaccaaattcctaagcactttggggttctataaggcaaattgagttactttttagcttttgtcacaatcaattaaggcttcaggttgcttcaaattgttaaattggttaccatttatctttttactttttaactttcatgattttgttgctgctattattttctgtcatatttttgtcttgatgggtttgtatattttaaaaaaatacctcttccatgtcatactcattaggatggctactattaccaaacaaaacacacacacacacacacacacacacacacacacaaaacagaaagtaagtgttggtgaagatgtggagaaattggaaaccttgtgcagtgttggtgggaatgtaaaatggtgtggctgctgtaaaacatggtggtagttcctcaaaaagttacaaacaatattaccatatgatccagcatttcatttctggccatatacccaaaagaatggaaagcaaggactcaaatacatgtttgttcacccacgttaataaaagcatcattcacaatagctaaaatgtggaagcaaaccaagtgttcattagtggcagaactgataaaatgtgatatatacacataacagaatatgattcagcattaaaaagggagggaattatgacacatactatagcatggatgaatcttgaagatactatgttaaatgaaataaggcagtcacaaaaggaccaatactgtatgatccttcttatatgggatacatagagtagtcagattcatagagatagaaagtagaatgatagttaccagggatttgggggaagggggaaaggagaagttagtgtttaatggatatagagtttcagttttgcaagatgaaaaatgttctagaaatgggtggttgtaatgatttcatgatgtgtgaatgtacttaatacaactgaattgtatgcataaaaacagttaagatagtaaatgttatcttacatatattttaccacaattaaaaaatttttaaaaacaatgaaaaataattccactttacatttattttattctcttcttgggggagatagagactaattaatgtattcaatgtgttgcttaaaattaaatctattatttcttagtttacagctaagatgagcctttttagggctaaatcacttgccctggtcacagatctagtcattggcagcctagggtttgattcagttctgggaggaaggcagggtttgtatctgctgtgatacatagatcagttcgattcattctttcattagccagcattagaacacctttttcattccagcactcttgaaggtagcagtaagcaagacagtaaggttacatcacattaccatgtgagatggagaaaccagacagtaagcaagtatatacataaacaagacaaatgcaaatgtggctaattgttatgatggaaataaagtgctggctgaaatgtgggtagggaaggcttctctaaggaggagacttcagagttgtgacatcaatgtggagatggcctaatcagtgtgaacatgtgggcaggagtgttcctggcagaagcaacagcaggagcagaggcccagggctgggaataaggttggcatgtttgagaagatagaaaagaccagtttagcagaatgtactgaggaaggggaaggacaagtgatggggtaagaggtgtaaaaaatgcagaaccttgtgagccttggagtaaagcagccaaagctttcctaggtatacagaaagccactagaggggtttcaaagggaaatgatgattttactttttaacattctgttggctttcactttgtatctactgtatagcagatggtaggttgtagataccagaaatgcaatatgtaatactgttgcccacaaggaaattatggtctggtgaggaagaaagagcagagagtgccagaaaaatatagcagcatattccacagtgtacactttggggtactagaggtgatttttaggaaacaaaaattctttatagtagaacaatttatattcctttgggtatatacctactaatgggattgctgggtaaaatggttctttgagaaagaagttctctaagttctttgagaaatcaccaaagtgctttccacaatggctgaatgaatttacattcacaccactagtgtataggcattcccttttctccacaacctcaccagtatctgttatcttctgactttttaatgatagccattctgactgatgtgagatggtatctcattgtgattttgattttgatttctctaatgattaacactttttcatatgtttgttggttgtatgtcttcttttgaaaagtgttcatgttatttccccattttttaatggggttatttttcgcttgttaatttgcttaaattccttaaatattctgggtattaatcctttgttggatgcatagtttgcaaatattttctcctattctgtaggttgactgtttactctattgatagtttcttttgctgtgtggaagctttttagtttaattaggccccatttgtcaatttttgcttttgttgcaattgcttttgacatcttcatcgtgaaatcttagccagagcctatgtctagaatggtatttcctaggttttcttctagggtttttatagttttaggttttatatctaagtctttaatctatcttgaattgatttttatatatggagtattgattttatatatgatttttatatatggtatacaattaggtatataatacctaattgtatttcctaggttttcttctagggtttttatagttttaggttttacatctaagtctttaatctatcttgaattgatttttatatgtggtataaggaaggggtccagtttcaatcttctgcatatggctagttatcccagcaccatttattgaattggggggaggggtctttccttattgcttgtttgtgtcaactttgttgaagatcagattgttgtaggtgtgtggctttatttctgtgctctctattcttttccatggatctatgtgtctgttattgtactagtgtcatactgttttagttactgtagccttggaatatagtttgaagtcaggtaatgtggtgcctccagctttgttctttgtgcttaggattgctttgtctattcgggctcttttttggttccatatgaattttagaatagttttttctagttctgtgaaaaatgtcattggcagtttgatgggaatagcattgaatctgtaaattactttgggcagtatggccattttaataatattgattcctcctttccatgagcatggaatgtttttccatttatttgtgtcatctctgatttctttcagcagtgttttgtaattctcgttgtagagatctttcacctctctggttagctgtattcctagatatttttattttttgtgtcactattcaaaatagcaaagacatgaaatcaacctagatgcccatcaacagtggaccggataaagaaaatatggcacatgtataccctggaatactacacagccattaaaaagaataagattttgtcctctgcagcaacatgaatggagctggaggccattatcctaagcaaactaatgcaggaacagaaaaccacatactgcatattctcactggtaagtgggagctaaacaccaagtacatatgaacacaaaggagagaacagtagacactggggcctacttaagggtagaggttgggaagagggtgaggatcgaaaaactacctgtagagtgctatgcttatcagctgggtgatgaaataatctgcacaccaaactaatgtgacacgcagtttacctgtgtaacaagcctgcacatgtacccctgagcctaaaataaaagttaaaaaaaaataaaatagatgaacaaataaataaataaaatgtggttactagattgattaaaaaaatgtctacaatcaaatcaggttggggattcatatgtgatatttccttagagattctcagtgcacaccagcatattaaagtcccaattgttacatcacagaaacctgtgtactttgttcaactttacatttcctaaatttatttgcacaaatagcttctttcaaataataccttttaacatctttttaaactcctctgggaaacactgatttaaggcaacatgacaattatatgttaggtgttatggcaataatgaggggggcctaactaccacaactctgggtgtgaaacaggtaagcattcaggattgccttcctggagtaggtgacccctgaattgcttccagaaggagtagagaggttagccttgtgaagaatagagaagggtatttcatagagaaagaactgccaaaacacagatatgtagacccaaacatcccacatcatcatccttggaaaatagatttacaaatttccagcaggaagaggaaaaaaagtgcttgaagtgtgctggtttctcaccttagtggaaataattgcttaaaaaaacagccagaggctggacacggtggctcatgcctataatcccagcactttgcgaggccgaggcagcagatcagctgaggtcaggagtttgagaccagcctggccaacatggcaaaaccccatctctactaaaaaatacaaaaattagccaggcgtggtggcaggcacctgtaatcctagctactcaggaggctgaggcaggagaatagtttgaagccaggaggcagaggttgcagtaagccgagatcatgccactacactccagcctgggcgacagagccagactccgtctcaaacaaacaaagaaacaaaaaaaaccagagtagaatgcaattctcctcatctggatttcagcaagaattgcccatttctgttcagccgtaggcctccatcctctgttgccagtctgttcttctgactctcacctgtctcctttctgcacacagaaggccagagagaatgaacaattcttccccatgtcagttggctcacccttcctggaagtgtggatttcctgttagtacctgcaactctgtcggcgctgctatttctgtcttcgcgttgtttcagaatactctcacactgctgccccatttttccgtacgcagtcttccaggcccttttttgcacctgatttttgccaggcagcataattagaggatgttacatttccctgaaagagcatattctcatggacaacaggacacaagggagtaagaaagcttcaaagatgctggagggtctccctcctgtaccccaacctgtgccacttggtataacaggattctacatgagttagcttttctttattgttattaggagattaataaaaattgacctcatttatttagtgcttactatgtaccagacactgtaccaagaatttattatcattcaactttcacaaccctaaaatatgtgtattttacaaatgaggagaagtaggctggcgagtagcttgcccaaagtcattcaactcagaagagaggccatcgtttaatcttagattgtacttgtaaaattcacacatccaatacataatgcctttaaatgttctcattgttaacatttattttctttggattctgtgcctatttctgcttatgtctccggattacctgggagcttttaaaaataagaatcctagggttccactttataacattgaccagaagtcaagaatggggcccaggaattgctattttcagaagctccctaggtgactctaatgcagggctcttcataccttggtgtgcgtcaaaatcacctggtgagggaggatggctgggctccacaccacagtttctgcttcagtaggtctagggtggggactgagaatgcacacttctaacaagttcccaaatgctgttcatgctgccatcctagcacttgagcatttttcccaatatgtgtatgatccccctcccccaccaactgggtgacgtagatagaactttaagtgtcattaagttatgtcatgttttgaatctttctctgctcgatttccacgtcaacatgagtgagggcttcagggattttactccatcattttggctaaatgccaacttggcaaattccactcctcccccggagggactgcaaatgccagtgtcctccttcattcaggagtgaggtcattgtctgtgtggttaaaagtggacactttctgctgcttctgcttttgcactgtagtagaagtttcaaggagctctattttacagttccaaattaccatccctcccctctttaatgcttccaagatggatagtctctcaccataggttaatgtttagattttgatctctatttctcagccccccaaatctggatgatcctctggtgccagagctgttgcatgtatcacccctggacactttcttctctgcttgaaccagagaataattatatatagtagttcccccttgtccatggaaaataccttccaagacccccagtggatgcctaaaaacatgggtagtactgaaccctatgtatactatgtttgttttttttttttttttgatctggtaactgagaggattactaagcggacgacagggaggtagtgcctacagcatggatttgctggacaaagggatgattcacatcccaggtgggaccaagctagataacgtgagaattcatcacactattcagaatggtgtgcaatttaaaacttatgaattgtttatttctggaattttccatttaatatttttgtactagagttgaccatgagaaattgaaaccatggaaagcgaaactgcagataaggggagactgctgtgctagagtgctatagaggatttcatttggaaaaaaaaagttttggtcctggaaaaaaagtttaagaacatagtcgtattccatttcttcatatgtttgagatatttctggctttggtgaaacataggctaggaaaagaacctaacatcttattagtgtaactgaacaacagtaacagcagacttagcctttcttccttatgtgcaacattacctgtgacctgactcttgaaacatagctgctattaaagtacaagtgagtcatgcatagcagcttctccttgcccagttaatttctctgtaaaatctttactctcttttattcatgtatatatatgtatgtgtgtgtgtgtaaatatatacatatatatgtttgtatttccctttaaggatttcaaacacaaagaccctagtcatttgattgtctctgtactgtcgaattttgcctacaaccctgactgtagagacacattgttacctgttttccatattctgtctagtaaatgcttggttgtcaggacaacggcatagaaggtggaagctcattgataaccacgtgaattctttaaacaaatatgatcagagcaaattccagggtatgcttgaaagtagatttaaggaagagcaaaggtttcagacatatccttccttttataaacttgatattcatctttaaggatcagcaacagttggagttactcataattttatttaaaatcctgaataaagatatcaccttagttttatggtacgtttgtcattccagcttgttaggcatgagtgtgttgttactgacagagcccctggaggacaggcagacactgtggttctccatggtctctcagtaccaggcacagagcaagcacccaatacatattataggaataaatgatctcaaatcttcacagtgcctcttatagatggcttttatgatatatatctgcagagaaactgaattcagggattttaagtgccttttttgcaaggcccttaaagtttgggaaagtaggtgcatggaattagaactcagattatcctgacttctaagatcacactcttcattgtagcacactgccttcttgccaaaaaaaaaaaaaaaaaaaaaaaggaagaaacatgtaaaaagacagaccatttctaagatgaaatgtgtgcttttcaaaacaatagcagaaaaccttcttcaaaggtaaaatagttggaaatagaagaagaaataatatgtaatttagcgttcgttgaggataagcaattaatcctgccctccaggggtgaatttatgtctagcctatttgcacatgaaagtacaagttgggcttcatttctatgcaagtaagacatctggttgggaagtgaaaaattttgtcagttacctgaatcatgtttggtctacatgatagaaaagcccctgatgtcttcagatcaccagaagacatttggcattgtatagttaacaccagatccactgactgagtggttcacctgagagttgctgcttgacatcctgtagattcacccattgttaggaggctgttaccattttgtaagtcagcagtttgcaaacagtagtccagacgagaaaccaacgctggcccttgacaaagtgttcactggtgtgtgatgcaataaatacatgaggtcataaaaggaagtgtatttaccttaaaaaagaacatcctttattttgagatcctctgcttcctatgtttttagtgatacaattttgtgtcaaataaatcctcattgtaagatttggttttaattagtaaatgagacaggataaaaaattgagaaacctatataaatccctagttttctttatgtgatctttgtatttgattgtgaaaaaaaaaagcaaaattgtagaaaccactgctttaaaccttgtaatatttttagcacaatgacacctaaagtattttcatgtatttcccaagttttccttttcctagaagtggggtaactctccatggtagaactgtttgcatgggtcttgaaagcattggacatcttaacagtcaagtattttgctgacaaaataatgaattttccttttgaaacaagcgttttgttcttaaaataactctaaagagaacaccttctgcacttttaaagcatttccctctgaaggcatgccgtggagacatgaccatagggagaaactttttgtgctagaaaactgaattccaccactgtgaattttttaacagctttcacaggttctgcagtttgctctcatgaccccaaaagcatatatctccacatgctgtaacatcaaggatctctcctcaagctttgtaagctcggccagaatgagctgagtaccctctgtgtgtcaggcgatgtccaatacactgggaatagggagtcataataaccataattttatctgacttttgtctagcatttgtcatgtggcagacaacatgctaaaacacttatttgcattatcttgcttgattcttataaccactctgggagaaaaataacattattatagcctttttacaggtgaggaaaccgttgcagggaagttaaatcacttgcccaaggtcacaagccctgtgagtgataaagccaccaccatccaagcctgtccaccccctaacctgaactcccaagtgctatgctaaaccacctgcctcttatggatatattatctacaaaaagagctctgccctcaaggcgattataatctaaattagaagagggaagcacaagggaaaaagccattatgtagagcagaatgatgtaattccaaaaaacatgctgttggattgtagaggaaagagtgattaattatgatctacccagggaaggctttttgcatgtggccttaggctaggtgagaacaaaatagggcaccagcaattatctagagaattgggtcactgtgggtgccaaagtggatgatgatttcaagctaaaaagactatgctctgaatagttcagaattggccgcccacactcctggaatctgttgaatttttgccaactcccttgttctctttgtgacttattgccctggcttagatgagcttcctactccaggtgggggaagatgcaggatggtgctgccatagcagggagtgctgacaacgtggaagaagccttccttgagtcaggagctctggattcaatctagactctgctcccacaactggttgactccagggaagccacctccttctctgggttcagttttctctactgtaaaatgtatacactgaagttgatggtctgtatgggccattcaaaatcccgtgtctctgtttttggaacagagaaggaatcagaggagaggactggaagaagctaaaagattcagcatgttcggatttcatgactcttgtggttttgttcctagacaggacctaccaggggagcctcctgcaaatgaggtggtcttccttttctactcatcacattctatgcctgccctctctaacctacatggtatagtaggaagacgccataccatggagtcagagaatcttgggctaaaatcctgaccatgtcccattacatagtgactttgaacaaattatgtaatctttctgtgcttgtatttctacaactgtagaataataggttgcaatatcatagactcttcatgtagagaatctaattctattactataaaatctaattctaataccattggtttggtgttagcaatgaaggtgatagcaactgaaaagtaagaagagcagtgactaaaagctcataggttttgataaatgggcactattactattataatatttattgtgttaaaatacaaattatgtacagcactcctctgaacactgacctacaatagttaccagttgcttgttggacttcttgaaccagacttgaccaggcaaagagaatttgagaacctctatttcactaaaaaggtggtatctacaatatcttgccactgtagcatctgctatgtgtaatgagatgcttgggcctgctggtggtcacctattttctaggtatacgcattggcttttgtggtgtcgccatatatatatatatatatatatataaaatatgtattatatatataatatatatacatgatatagatataattaaatgttatattcaattaaaataaatataattttaaattaaatataaggaacatgagagttagcaggaatcatgggtgaaaaaaatatgtataataacaccacaaatgcatatatataggtttttgcccatgattcctggttaactcccatagcccttattataacattggggcacttgaggcctcaggcaacagtctctctcagtgaccccctctggtccttcttcacctgcccaaggtaggatgctaatttgattatggatcagaagaccctcattccagagagggtcctgccccatagcctagtggaaagaatgctacacagagaggccaaaaaaagtctgagcagatagtccttgctggatttagatcatatgctttttgtccaatcatatttttacatggttgtcaatcatgcctgtgtaaaaaagcctccataaaaacccaagagtacagggtttggagagctttttgattgctgaatacatggatgttcctggagggtggagtgcccagggaaggcatggaagctctgcgccccttcccccttaccttgccatgtgcatctgttcatctgtatcctttgtaatagtatttataataaaccaataaacgtgtttccctgagttatgtgagctgctctagcaaattaatcaaacccaaagacagggttgtgagaaccccaacttgaagccagtagttcagaagttgtggaagttggacttgccactggtgtctggtgcgtggggttgggggcattcttggggactgagccttcaatctgtgagatctgatgcaatctccaagtagataatgtcagaattgaactaaatgacatccagctggcgtctgctacagaattaagtgcttgcttggtggttgggagaaactcctacacatttagtaacagaagtcaccttctatgtggatgattgctgtggtgtaagaccagaggaaaaacatgatttcagagtttttccctcaacagccttgagatactccattttaataagatagagagatgaaagtgtattactggtgggattatgttagaaaacacatttcttgtcccagtagcattcaagatcaagagttaaacttaatacagtctctcctctttactctcccaactgatattcagcttcctgtgtgagtgtatgtttaatgtttttgtctaaattaattgatctttgtcttatgatctctcgtcttaaaaaaactaagttcagctaaatgaacattgctgagaacttatgttctagacactgctgacgttgtgctgaggggaaatgaatatagaggtaaataaaataatttgaactattctctgtctagtgggaaagagagatcgaggtataaataggggaaaaaataaaacacaacgtaagggtcataatttttaagttggattaaaaatatgtgtgtgtttctttattaaacacctcttataggccagactatcgggccagggatataacattatataaaactcagtccaaattgcataggtgtctacaagatgtaataactacaagatggcataagaagaggtattggatgggaatagtgtcgactagaaagtaagctacttgagcgtaggggccttaactatcttgttccttaatgcatttttagcattagaacagtgcttggctcgtatcaggtactcattaaacatttctgtagtaagtgatgaggctatcataaagttttgtttccccacccctaaaccagattgtaggttcagtctgaaaggactccaggaccctctctgctggtaagacatggtgccactttgtactctcccagccaatctgattggcctcttgactttggcaaaactgagctgggggctggcccccagtgccaagcacagaggaagcagggtcacatgccacccatgcccaaagctctttctgacatttccatgggcctggaaccaactctcctcctgggtttcatctcattatatgtgggaagacaaaagaacactgaaccttccagttaattcaacaccccgcccccacttaccccttcctggagaggataacagttctgttgaccattataatgcattttctgtctcccagcagtccacatagtcattaatttctgctgctgacatcaggaaagaggattatgtgtgtgtctgaaactgttcccaaagtgctcattagtcatagataattgaaaaactggtaggggaagatttggtgtaataggagcccccgcctgtgaagagggactgcaaccaccagataattgtagattccagcttttgaccactcagactgaatctgcccatccaaatgggaattcagcagacttgagcctaagagctctcagagtgatagtgtttttacatacccaggtgagggtgtgtacaccgagacagagacagccaaatcaagagaataggtgaactgcccttgggtctctttcctgccttcagactgtggagcagtgtttggaaaaagtgtccagtattctcctttattttgtttttatttcaacgtaagattgttttgatcacaaaagacatacaaggtcatgggatataagaaacacaaacattagagaagagtaccctacactggatcccaacccatgctgtgacaaaattctagggtttttctggaagtttatgtgcttacatttttatatccttttctttaaaaaaaaaaatcacatgatcatactaagaatactattctgcatcttgccattttttctgaatttatcttggagttccaaatctataccttaattcaagttcattcattttaatggcaaggtgggattctgaccagatttaagggggaaaaacatcttttaaaatattatacaagaggctgggcatggtggcttatgcctgtaatcccagcattttgggaggccaaggtgggtggatcacttgaggtcaggagttcgagaccagtctggccaacatggcgaaaccctgtctctcctaaaaatacaaaaattagccagccgtgctggcgtgtgcccgtagtcccagcaacttgagaagccgaggcatgagaatcgcttgaacctgggaggcagaggttgtagtgagctgagattgtgccactgcactccatcctgggcaacagagcgagactctgtctcaaaaaaaaaattacacaagaaatgtagaccaattagaaattagagaaaaaagaaaaaaaggaaagaaaaaagaaatcactcataattcctccacccagagaaaacctattttctgtatttttttcccctaggaatgtatttttacaaatagttcatctactttcattgttgttgttcttacagctgttaaaagaaaacctttaggcaaattaaatttaacagtttaactgtgcaaagaatgattcatgaattgggcaggtccccaaccagaataggttcagagagacttttgctcagccacatggttgaagagaaattacggacagaaaaagggaagtgaggtacagaaaaatggaagtaaagtacagaaacagctggattgggtacagctctgcatcggccttatttgaacagagtttgaacagttggccgcctgtgggtggttgaagtatgtcttctgtgattggctgagactcagcttctagttacaagagtaggttacagtgtgtttacaaatccagttaagttacagtcactgtgtatgaagaaacctttaggctgaagttacaaacggacacctttaagttaaacttaatttaacaaaaggaagtcatatactgcatgttttgcagcctctatttttcacttggtttgactgttttaaatataaaaattattccccaagcttttctttacactgtgtgtttatcttcttttttatttatttatttttttgagacggagtctcattcttgttgcccaggatggagtgcagtggcgcaatctcggcttactgcaacctctgccttcctgggttcaagcgattctcctgcttcagcctcccaagcagctgggattacaggcaactgcaaccatgcttggctaatttttttttttttttttttttttgtatttttagtagagacggggtttcatcatgttggccaggctggtctcaaactcctgactttgtgatctgcctgcctcggcctcccaaagtgctggggattacaggcatgagcaaccacgcccggccacatttatcttcttaaaaacccaacctgagcacttacagtcgtgcccctctgggcaattcctttttgcctggccacgcctgaagccctccgctgcctcttgtcccgtctgttccagttctctgttcctccttgttcccctttttgcgacatactaaatgcctcaaacacaccatgcccctcagggctccctacaggaaactcactttttgctctgctgtcatccctttccccggagcatgccagcactgaaaccaccaatctccaacttgcctttccacacaggcttgaaagtcatcttcaccttgaagactgtattcactctactagccaccctaactggaccctccacagttctctgggaacaccatgtacacatttcacctttctagcattttctacatggccctaagagtcttagtttttcatcatctttgtcccaaaccacaatatgagacctcagcacctagatcttagcacatggtagatggaaatctatgcaggcaatcattagttctattgtttctgaaatgtttgttaaaatgcatgaatgaatgcttgaatgaagcctagaaagaactgcaaatgctcaggcagtgaagtcttgatttctgggaaaagcaatgctgtgaataatttaattttatggtgaaagaaaagccaaacaaggattatattgggaaaagttgtcaggaggcactaatgtttgcctctgacagctctagtgccctcagtgtacctctggctgataaacttagagtgtgattttgaaggggtgatttctcagggattctcacctatttctatcatcctctctcatgccaagctgtttcattttggtctctaaataaacaaagctccttcctgcttggagtccagatagcctattcctgaaggctgtggttccaaatgaaagatgggatatttgtccttgtatatatttattttcatccctaaccactggattgaggagaaggctggttcactgctgtaggttgggttttccagaagcaaaggctgagacagatttggggggataaggtgtttattagggatggttggctgtgaaagaaggaagagagagaaggactgggtagagggaaaagagctgaactgaggtgcattcctgcagcaccttggtgaactcagcagagtctctggagtgagtggtgtctatcagagcccttctgcctctgctttgcaaagtcaccaggtactggctgtcctgggaggtgcatcaccttgggaaggcagctctctgcaactgaggcaggccctggaacatctggcagctgtctgctgactttactccatccttaagggggagtttgagccatggtatctcagtctctaccatgcttcctatatccacgcaaccactgtgacctgttatttcttgttccatggaatcccttctgtctgcctctgtttctacatctccgttaccaatatctcagtgaagatccttatattctctctctttctttgattactgaaatagattcacactattttccctaaccccagtctatcctctgctataatactgccagagagtgcttaaaaaagcacaagtttaatcgctttcctcctggcttaatgctcctttagtggtttacagtgggcttcatgattaagttcaaacacttaagtatggattacaaggccctgcatccactgccccatctgcctccccagcttcctctgtccttcaacacccaccccctaccagttcacaccccagcctatgttccaatttacctagcccttttgatagttcccttaggggccccttctcccttttttctgtccttgctcaagacgcatcctctgctgatgaagctccctgtggtcctatagcctataattagacccagatctcctgtctgcatgcccaggactctctctgcctcgcagtggtctgcagcctcatgttctgagcctagaggacatagaatcaaattaagctcctttaccagctaaggtttcttcctaaattactatagagaaaacttggaagagtgccccaccctgctaatcctgtctagaaccttttttataaaaattacaccttttatgtttgtggagattgggggtgaaggtggaacagaatttccattttgaccttcctatgaaaaccatttttaaaaaatctcaatttagtaggcaagatttctaaacggtgctcctttttctttttcttttttctttttttttttttttaacatacataatgcttgttctaaaaatacttctcttgatcctttcatccattcagaacccatttttaaacaacttttactccaaaaggtaatgtaatgaataagagcagaggtgtggatatcagtcagagtagaacccatggcctgtcttcagctcttaggctgtctctagggtgtttatttttcttctgtaaaccacaattttcccatctgtctgtaaaatgggggtagtatgggtcctattgtacccttcacagagggttaatatgaaaatgaaatgagaaaatgcatgctatgtccttagtgcagtccctagcatgaaagtgctcagcaaactggagtgcagtctctcctgtgttagatactagccatagtgacataattaagatattgtccagaaccgtattatacaaagccaaggacactgctctcttccaggtttctgctactttggcatttgaaacagaataagattttcctgttctctgccccatcctttgagcatcttatacttatcctccagaccatcagtgtccaatagaaatataatatgagccacatatgtaatcttaaattttttagtagccatgctgaagaaagtgatactaatttttaatgtatcttatttaacttagtatattcaaattattattttaacatggaattgatataaaaattattgaggtattttacattcatttttccagatgaaatctttgatatctggtgtgtattttccgcttaacacctctcaattcagacgctagatttttgttggaaatacttgatttagatttcttaaattaatctagaaaaagtagattcgcatacccaagttgttccgaacatacttaaaagtttttcagtaactgaatttaatatcagtttttaagttgaagttaaaactaaataaaactaaataaaatgaagaatttagtccctgagttactctagccatacttcaagtgctcagcccacatgtgactagtggctgccatattggacagcagagttcttctagaagtcactgcagaggtttcagtcttactcttcttagctaaacttgttttcatattcaattgtagatagaagctcttaaaatggataaaaatggtgtcgtcaaagtgctttggttccatttagaggaggttggttaagctgttcactctctgacccctctcccaacctccaccctcacctctacccccagaggtcctggagcacctctgcccagtccttgagctccatggaacaattaacaagtggcatcttagcactcaaaaattgctgattatgcacccagattctatcttggggctcaaaggggtcttaatatatctatgagtcaactcctagcccctccctgcagtgcagaaatactatagaatccttgggggatgagagagggctcgggctctgtttaacacctaggagcagatggatcatttcattctattctgtcttacgtggttctctgggttcttatcttgtcttcctaactaggttgggggcaaggactgcttttcacagccccacagcacccacacaaagcaagacaatcaattcttaactgaaggcctgactgcaagaattcaaggtcacttgaaaaatcagggtcactgcattgcacaactccaaagaacatcattcaaattgtattatatgattgtgcaagtggcagccttgtaaaatttgcaaaggtttagactggaatattttttccagctgagaaaaactttttaactaattatttgttggtacaaagtacacctttttcctcttatcctctgccaggaagcaactgaaagagtaagttttcttgacttaggaatatacgttcattagagagggtgtatggatgtgtgaacatgtgggtttacgtgcgtttaagtaggttagtagatctgctgtgttaggaagcccatttggaatggtttgagcatttaaaccttgtatttaagaggctactgtgtttatattccttttgaaatttcccattttcagaatctttatctggtttgaatgatgctttagagttccttgtttgtaaagctccacaaagcatgacccataggtaccaagcacgtacactaaagtcactggatgagcaaagggactcttgatgactgcatggtttttatctttgcaaatgcagaggagggaggagagagcaaagagtttctcttaaaaaaaaccctctgtttacttttgtgtttttcaaactgatggtgtttgttttttctcatgtctacccaggaaaccaagtgctacctcctggagcttctcttggaaatgggctcacaccagaggcagcaagagaccttggccttctccctgggattgcggtcgcagcttcactcattgatgcccatgcaggaggactaggtaatctcttatttgttgcctacagccaaaaccgtattcaaatggaatattccctagaaccgaagacactccttttctgtttttaaagcaaaggtcaaggactttggtgtttcaggatataataatgaaaagcctttttacagctaggcatttggatagaattacagaacttttcattaatgataaaatttatttataattgtattaatttctttatacatggcaatagaaaaaaatgtatttgaataactttctgcatagttcttttgtttactgaaaattcaaaaaagatatgttaatttcttgccacacttagctctactgtttttttgtaaggtactccaaaacccttataagtctcttagatttattttaataatatatttggcttatgtcctgtatccagttccttggctgcagtcttgattttatcttgtacataactctcaagtctttcattcatgtattcatttgttcattcataaaacacccgttgaacacttaccatgtccaggcatggtgctagaagacagtgaacttaaaacaaaaccaaataaaaccaaagtctcttccccagcttttaatgggaaaacacacagggaaacaaagaattacagtaaagaatgatgacttcctcatccttattgcaggttgtgtgtgttttttgcaggggaagttgttctggttctcagcatctctcatctcaactgtagccatatatttttttcctagcctttcattctaacaatgttttgttttaaactatgatttataattcatgagatcaatttagcaggacatgaccactgaatttgcacaacagaatggaacagaattgaatagaacaaagtggaaaacatcagagtacatttcacaaagtaagggaaggcactgctttgtggagctgtgtttccattctgtgtgtgtatactttcagacacttccatactctgcccatgcatttacacctctgtgacttggcacacatgttctttgtccagaatgattggtcctccacttctccagctggctaactcctcctctaactgcaagacccatatcagatgctttctgctctgcatagccttccatgaaacactcaggtgtatttagaaattctctaaattatgctttttttcagcacactatttgaagaaatgatcatattgcattgtaatttcaaatatatctgcatgtcatttccattagagtgtgaactccttgagaacaggaacattatgttatctgtcctgtatccttcatgccaagccctatgtctggttcctatagctgcttattaagtttattaaatgaatagtcacattaaggcaagaataaggtgaaatggctttaaacagtagagtgaagattaatctgttttcttatgcaacggattattaaatggtgccttgttctacatactacatggatttccagagcaggatcgctctcatcaatctatggacatgtctgtcctgttcatctctctgtcctcaggatctaaaacagtgcctaagaattagtaaacaactcataatatatgtaggttggttgaatgctatgtaacgtagttctgattacaggcaaggttgtttctctccaaatacttttcagtgtgagcaatgtgtgcttttgattggaatgttaagattttggtttttacatacaagcacagagagaacttgaggtctaggcagacatggagtgtttctgtcccctagcaatcctgacattccagatcatgtgtgaggccacaaaagctttctctgtcatgctttttaaattatccctggggtgacagtgtcaatcatccacccctacctgggtgacaatcacttggctgggaccggcatatgctgaaagaaagagaactgctgcttgaagagccgcaggcactacagtttccttgtcagtttcccagacttccctcagggacgtgccaaaacacaccttctcacttctgcccaggactcactatgtcctccaggaggggagactgtcaatgaccctcacctttttcctaaacagagatgttcagtggcagaagttttacccttagaagctttggcttaagccttttgttccccgtaaaatgcaaatgcttgtaagtgatatggtttggctgtgtccccattcaaatctccacagagttgtatctcccagaattcccacatgttgtgggagggacccagggggaggtaattgaatcatggaggccggtctttcccatgctattctcgtgatagtgaataagtctcacgagatccgataggtttatcaggggtttccgcttttgcttcttccttattctttcttgctgccaccatgtaagaagtgccttttgctcttcgccatgattatgagacctccccagccatgtggaactgtaagtcaaattaaacctccttttcttccttgtctcgggtatgtctttatcagcagcataaaaacagactaatacagtaaattggtaccagtagagtggggcattgctgaaaagatacttgaaaatgtggacacaactttggtactgggtaacaagctcatagagggaagagacttgccttgtctctgatgagactttggactgtggacttctgggttaattctgaaatgagttaagactttggaggactgttgggaaagcagctgggagggaggctgtaccctgcaaagccacagaggcagcgctgcccaagaccatgggaacccacctcttgcatcagtgtgacttggatatgagacctggagtcaaaggaggtcattttggagctttaaaatttgattgccttgctggattttggacttgcctgggccctgaaactcctttgttttggccaatttctcctggaatggctgtatgtacctaatacctgtacccgcattgtatctaggaagtaactgacttgttttttattttacaggctcatgggtggaagggacttgacttgtctcagatgagactttggactgtggacttttggattaattctgaaatgagtaaagactttgggggacttttgggagggcatgattggttttgaaatgtgaggacctgagattgggaggggccaggggcggaatgataatgatttggctgtgtctctattcaaatctcaactaacttatatctcccagaattcccacatgttgtgggagggacttagggggagggaattgaatcataagggccagtctttcccatgctgttctcgtgatagtaagtctcacaagatctgatgggtttatcaggcttttctgcgtttgcttcttcctcattctttcttgctgccaccatgtaagaagtgccttttgccctccaccatgattatgagacctcccagccgtgtggaactgtaagtcaaattaaacatcctattcttcccagtctcaggtttgtctttatcagcagcataaaaatggactaatgcagtaagttagtaactttcccccatatttttgttagtggaaagatagaatagtttttttttgttttaatggaaagatagaataagaatcttggattctttaaggcctgaacttagatgccagcagtggctgggaagggcacaggaaggtgatagtccatgatgacgggttgatacagacttacttaatatatgttgactatgttttatccttattatgccttcttatgccttcttatgcctctttctttacccttcaccttacagccaatccaagagttggatatctcaaaaaaattaggaggcctgggtgcaaatgtttcctttcatttctacctttcctatacccctattaggatgtggaggtgaacagatgcctgaaaatcttgaaaaggttgtccatgggtccaactctatattaactaaatataattgagtgaatgcaacctgtcagtgattggtctaggcactggagattattagcagtgaacaagtcaggcaaagtccattcgttttggaaagaaaattctcattgttctcccctgcctgcatgtttgtagcttaatagtataggtttgggacagctaatccctgagacatattgtgatgctatgacaagggcactcaaaatggaattttaagttctggatttagattgtgtttctgcctacaaatatggtgcttcgcagaacttttgtctcctgttatgcagtgagagagtgagagacaacagaatgcaggattcactactttgtgattctgtataggttgaggtcagtaatagcctcaagaactggctaaatgaaccctgtgttaagagatttctgaatgtcaagtacagacacagctttggatttggaattgccacccaggaagaggccatccaggcctctcaccaacaaaccctgacaactgtagtcacttcaaatgctgacctggcatggcctgcttgaaaccccacattctgactagtatgaggggtcagcactctgctttagagaaatacccctggactttcattcccaagggaggcctgggatgggaggataaagatcaaagaagcaagcaaaactcaacccatgcttttcccagttctggaaaaagaggaggaagggctttgtgggaataaaaatcaatgataaaagaacattttgttcttaaggtgctggttagtaagttctccagcagacagtcagaagataggagtagctttgtttgcactttgtgggggtggttctggccagggctcctgctgctgatatttttctagcttataaaaataacattaacttttttccaggtcttttcttggctccagcaccccaactgccctgaaaggcaataacaacctgatttctgtctcaggcccttctcttctcagttgctctttttttttttttttttttttttttttttgagacggagtctcgctctgtcgcccaggctggagtgcagtggcgggatctcggctcactgcaagctccgcctcccgggttcacgccattctcctgcctcagcctcccaagtagctgggactacaggcgcccgccactatgcccggctaattttttgtatttttagtagagacggggtttcaccgttttagccgggatggtctcgatctcctgacctcgtgatccgcccgcctcggcctcccaatcagttgctcttatctggcagacagactcctgattatccatcaaatcttgaatcctgttctcctctgggaagccctccctgacttcccaagttgacttaagcactctctttttcccccactgtgtcttgcgcttgcaggtttgtgtgtgccacattgcctcatctactaatttataaactctttgggcaacctgttgtttcatactcccactgcagcagcctgcagagtgctttacatatggaggacccttaacacatgcgtatttagtgaatgagtgaatgaatgaatggcattccctccatgaggaacggatattacaactgagagagagagtaacctctcattcaaaggcaattgtccctatacaatagttatacttggcttatttctgcaggagcaaaagtttgggttcttctagatgtttggaaatctgtctcctttttgccctcatcacattaccaagtttcggccaagagcaagctttgttccttggtttagcacaactatttgattaccaatattggattatttggcagatgttgaactggcttaaattgctcatctgggccagatattgaattggtttaaactgctcatttcaattgcagagccaggccaaaatgaggattttgaatttcttttctttttaaatggaagaatttattgagccagtcttgcaaaaagggcctttggttcatgccctagaacaacacatagtttgttccagtaaacaataaaacatgccaataacatttctcaccattatcagtgttctagaagacaggataaaggctgcgatctaaagcctgcgactttagataatgtgatttggggggaacatttatttataagtagtatatatactaaatgtagcatgatggataaagaaatatacttattggcaatagtccattgcgtttgtaaacttttgatttatgaagcatgatatggtttggatctgtgtcctcacccaaatctcatgcaaattgtaatccccagtgttggaggggtccctagtgggaggggattgtatcatggtggtggatttctcatgaatggtttcgcatcatccccttggtgctgttctcatgatagtgcatgagttcccttcagatctggttgtttaatagtgtgttgcaccaccccactctctctcttgcttctgctccggccatgtgaagtgcctgcttccccatcaccttttgccatgatcgtaagtttcctgaggcctccccagaagccgagcagacaccatcatgcttcctacacagcctgcagaaccttgagccaattaaaactctgtcttctataaactgttcagtttcaggtattcctttatagcaatgcgagaatggactaatacaaaacacatctatgttcattatagaatttgctccttatagcaactttgtagtgaagttaggacaggtatgtgttccctcattttgcacagcaaacagctgaggctcagtgtattataaactcaagaatagatatttatcttacacttagttcttaaggcaactttatacatactattattctatttgtcagatgagacagttgaggctcacaagactacctaacattctgagctacacagttaaatgagagatgcgtgacttaagcccatgctttgtgcacacttatcactgtgttataaagaatggcctacctatttaaacatgatccactctgctctttaatttgaccctaaaaatgtgagcaagtaacaaattttgaaaaaggaaagtctttaatatttattgacgacccactttactagttcatggggttagacagtgactatgagagagaagtggacttctgggaatttgtattctagtaaagaaaatagacaagtaaataaacagttacggttacttgtgccgtgtatggaaggctttggaaaaacataaaatgggcctaaaattgagacttaaacaattattaaaggattcctagagggagtgatgtccagtaatctaattacgacactgctttccctgttattgcttcctggtaaagtggaatttatatattttttgcgacttttaaacttcaactaggcttcatttctaataataaaataataacattgttaattagaacaaatacaaccaccactctgactggtactactatgatgaccatttcttacatgtgtcctatgtgccaagtactctacctgatactgctcagactttatatcttgctcctcacgataagcctacaaggtagaggttgtttccccattctgcatgagggaattgaaggcagaaagaataatgtttccacaatcacataactaatctcatagcaagatttgaaattgagtctgcctccaaggttcatatatcttttctctaggccagtggttctcaaccaggggtgatttgacccctcaggggacatttggcaatgtctggggacagttttgtttattgcttctggggaaagggaaatggcactggcctgtggtgggtagaggccagggatgctgccaaacaccttacaatgcccaggccaaccccctgcaacaaagaattatccagcttcaaatgtcaaatgtcagtagcactgaaggtgagaaaccctattctctcctggaacacctccagtgatattatttctcttcatcaattcagcttatttctatagaagccaaaaagcagcccacaataagggttttgctgatacattagtactttgttgaaatgtgttttgtgaaattgactcttcagtaaaagtagttgtgagattaagaaaataatagaagtgaagcctgaggagtagggaggacaggatggtttctagctcatctatttcagagtcaagccacacgggacaacttggccgtctttcagcacatcatgcacattccacctcctttcctttgttactcatccatcagcactcagtctaaatgttactttgtggaaacatctccaaatttaatccattcttagaaaagcaccaatcactctctatgctgtatctgtgaaatactttacaactatttcagttttttcaccaaatcatgttcacgtttgtatgcccatcatccagcatgaaatccacatagctggtcttcactaaatcaatgtaattatttaattactattattagtaattaagataataaatataagagggttttgaaaaatccagaataagaattggtaaatataggtgagggagactttaagaaaatatagattcccatgccctaccctgctgaggatgcctggaatcttgttctaagtgtggaaaatgtcacctggtacccagaggagacagcctggggggatgagttggcactgaggacactggggtcagaagcagtattgatgtgtttctgccaagtaggcagatcagaccagagcagaaccgtgctgcgcaggagccaggccaggcgctggccaaaagctgggggcaggagggagcttgtccaaaatgagagagaatatggatccaaagaggcagacggtctgcaagaaattgggggtggggggggattagaaatgcagataaagtcatgccgtggaatctggaaggagaaaaccgtgccagtccctgagcagatagagcaaggacaactctgggagttcctggatgtgaatcacagagggcagaggaagaacgtattcatgggattgcaagtttattgttttaagttgaggttcggtttaatgcgacccactactgcctgagacctcggcagttcatgagccgtggcaacagctcatgtgatggagggaggggcagagagcatacgtggggggaaggataactgagtttcctgttcccaggctccaaggctttcttggagtgctgtgattctctggactgcagaaggctggccttagctgagagaccagactttgactctgtggaagaaaaccgagagaatccagggcctggtgctattgccagctccccatgtgtccccagtttttaaatcttgtgccacacgtcagtgtatatggctgtgaacctgccatgaaaccataatattttgagtttaatacatacactcctgtttggataatgagtaatcataggctttagaactaaaaggctgctcaaagattctgtataccaaattcttcaatttgcagatgagaaaactgaggcccagacaatggtgaatcatccaaagttaccccagcatattactttcagagtcaaatttagaatctgagtgacctagttcatcagccagggtccccgccccattgtactacactgtctccagattaggaaaagggaatgactcctgatttgttattccattttataccttatatcccatttaatggccacaggcagcttcactggtggttattaaataggtaatttagttttcctgagccacacttgagtaaatctctttgttttgttgtcacaatctacaaaaagctccaaagaatctcctccagagctggaaataataaaaacacctgctattcgagttccttccaaagagctcaaagcagttatttttatttcacctaccaatcgttgaatacctatgctgtgccaagtgttttgctaggtacttgactattcactattgtgagctcacaaccacactgtgagctacaattatttttggactttaacatacaaggatgaaggtttaagaacctgccaaaggttacattttaataaattataaagttgggttcctggacccaccgattgcagagcctatgagctctcccgtgttgacctggctagtgaatctatttgtgtgtaggtatgtttgtgcctttacttacgttagcccatacttacaccaatgcatatttgtatctatagtggaagatagagcttctgcttaatatccttctggacgtttgtagatctattttatggatgagaaagttgaggcccagggtggagaagtgactctaataaagtgtatttaaagcagcacaggagtctgggttccatcaatcatggggaataaggccaggcttattagatcagggtaggaatgggatgcgtagctattggggttgtgtggtggagagataaacaatattaatgttgacgttaattttgtttactaaatttgttaattaatgcttacaatctcaatctcaaagattaatcttaatctttttgtagtgacttgctgtttttaaactacccttggaatagggaaggtatttttacctcccacgaatggttgggaaaactgaccttcgaggaggtgaagggatttgcctaaggttacaggaccaggaagactggatccaagactcaaacccttatttgtgtgcctctgtcttcacatcagctttagtgcaacccttgcatcaaacaatggaaaagtagtacctagtaaatggagcaaggtgtcttattctgtgcccagagcctctcattttaaacaagctctgatcatctcatctactacagaactgtatctggtattctggggccatttttaaacagaaggtttcacttattctctcctgtattagtatatggccgagaaaattagctgagctgttattttcctttgctgaactggggaacaaaaacaaaaaaacacacagtaatccagccactggttctgacactgccaagcacctgttaggaggacttcctactccaagttcaaaaggtacggactgctagaaaagtgtgtgtttgggggcccagagtctaagattgcacttgcgtcactggctgcaagagtaggatcaggtccactgtttttcatggcacaaaaactcaacagatagtgcttcacatccatatactgtttctaagcactaatgtttactttgggtcttgcacatcagcagctgatggtgggaaaatacacatctctagttattgccccaaggcggcagcctcacatctaaactgctggcttcttccttattatctctccacaggcctggttcatttccttgttttcagttttctcttagctgtgcattcatatcagtcattgtaaagagcaaagagaaataattttaaaaattttccatatgggcatcttgagcattgcctcagtacactctgtagctagtatagatatctggggaaactaagaaggaaaatttctttgaatatagaaaaatcatactagtctccagttatatcattcaacagcagtccccccagcccacctttccatacctctaatctgtatctgtgctttgtactatgactctgatgtaagagtttggctctctgaagatggtaaaaatttaaatgcttgaggtaaacacagtaagatagttaaaaacacactactggttccatcagctgtctctttgcccttggaagtcatctgacactgatggcagcagtgacccatctggagcagccactgcgaagatgctggctgcagtagaggaatgcactctgcagagctggctggggccagaacaggtgggagccctgtcccctaccaagttggcagggtgggagccccatgctcccaggcacatctgcagccgcccagctgcggctctggacctgggcatccctacgctctcaggggcccaggaagccccccttcctttgcagacttggaaatgcttgctcctactccctggcctcttcccattgctggtgcctgctctggagtggggcagagttgtggctgagcccagtgctgtcacaatccagccaggtgtacatgcacttgaggtggtgctgacacgctagcctcctgccaccttggccctctctggaccttgggcgccaacgagcatggcaggagctgagggcagctcggctcaggcctgcaggtgcctcagtaggaacagactgggtggcgggttgatggcaggaggaagcagacaggctcctgggcagaaaggagcgggtccctggcgaaaccccaccttcaagccagggacagtccgaagcctggtggctggactgccagttccaagtggagtctgtggcccagagtgagaacttgtgttgctttttctgggtccacccatggctacccatggaccaatcagtactcatttcctcccttctgagcccgtaaaaatccctggacccagtcagacacggacagactcaggactaccagctgcaggaaggagctacccactttgggtttctccacccattgggatgacctgcctgcagaaaggagctacccacttcgggtctcctctccactgagagctggacactcatctagacgacctgcctgcagaaaagagctacccactttgggtcttctgagagctattctgtcactcaatgaagcttctctccaccttgctcaccctgcagttgtctgtgtatctcattcttccaggttgtaggataagaactcaggacccactgaatggcaggactgaaagagctgtaatacaaacaaggctggaaacacatccctccggctcactcgctactttgtgggcaatgaggagagaagagctgtggcccttcatggagcccagacctaggggctccccaagccaggggtgtgacactgtctttaaggctttgaggttcatggcatctccaagcctccaggtgcccgtgttcccctcatccagatgcgggtgcccatagcagaagccccatgcagcacatcagatccagctgcagccttgcgtggagctggcacctgtgccagcacctgtagctgcctcccctgccacagcagcttgcttgtctggttgtgtgcagtggccggactctgcacttgctcacccacacacccctcactgctccacgcctgggtcacccttggtaggtgtgggatccaggatggtggcgtgagctgagcccagcctgctgggccaagtgggtggaatgagcccagcaggcacgagcaatactcaggcagaagatgccaccagccacagaggtttccggctggcaaagtgacaccccgaggatcccatgacagtacttcatgcctcagttcccccatctgagaaatgggaataatagtacctcttgcatagatttgagtaataaatgagcttttatttgtaaagcacttagaataatgtctggccatactctgtgtgtgtttagctatgattaatgtgattgcagtaaagttacattatgaatagtagcagtgagcaagagaaaatcaaagatttattacttgatttacaggtagatgacgtcttccttctgtgtgtcaggcattgttataggtatgttagatacagtggtaaacaaagccaagctccttctcttatagagcttctatcctactggggacgttcataaactcccatttaaacatatgtatttataggtatatgtaagtatacatatatgtattgtatgtgtgcataactgtgtgtctctgtatatgtgcatatttataagtgtcttcatacacatgtgtttatgcatggatctggtatttatacatgtatgtgtattacatgtgtatatctgtatgtagttgtgcatgcatatgcatccatgcctgtgtctgaatgcgtgtgtgtatgtgtatatactgtgcatgcacatgtttgcatgcccctatttgtatgtctgtttatgtgtacatttatgtgtgtgtctgatttgtgatgtgtttatgtgtatgtgtgtatattctaatgttcatgagtgtatatgcatgtgtccgtatatatgtatgtgtatatgtgagtggatatgcatgcatgtgtttgcatagggtactgctgagtgttatgaagaatagtcctgattaaagtgatggaaagttccaggaggtgctactggtatacagaggtcaggaaagttcagtctagaatggggacatttgaggaaacataccttaatgaagagaggaaatatttcattgtgtaaaaagcaaggcagagattttttcaatcagcaaatatatgttgagcacatactttgcctcaagcatgtgctgggcactgggaataccaggatgaagatgacccagtcccttctctagatgactcagcagctggtggaaatgggagatctgtattcagaaaaatcctaatacaacttgcatactgcttttccaggcggtgtaaaaatgttacaagagtatagggaatggatcagccagctcttccaggacaagttaggaggtgaaaactcctagaaagtgaaaacttggataagccttttaagaagcagtagtagaatgtgcagaggctcagggacgttaaaatgcccttcataatcaaggaacattttggtgtggccacctcgccattcaaatgtgcgagaggggcagcgagaggcagccgggaagacggagcctgtgtagcacactctgactggaatcagactgcctgggttcaaacccctgttttgccacttgttagtaaagagcttacctgctctgtgcctcagatttcccttctgcaaatggggatgggaatagtgcctcacagggttattttagagatgccttctcctgacacattgtaagcactcaacaagtgttagctactcccagttggaagctagaatgtaaaaggccttaaattcccagccaaagagattgaatgctaaaattaatttcaagcaaacctatctgttcaaatagctttctcagcactgattttgatgtgaaaaatatctggaatattcttcgttatcaagcatgtgccttggtagtgtaattacagtttttaatactaatggatgatcttccattaaagtagtaaaaagataccatctcattttaagcttagagcaaaagcttacttaagtgaaattaagcagatatttattttgtcaggctctggggaggattccgaaattatttgctccctactagtgcctagcactttatctttgcaaccgcacttaccctgtagagtcatagttgcacaggaaactgtattcctgcatctctaccttcagtgtttcacgatcactgtttctcatctgccaggcctgagggtgggcagtgctgatttcactgtctcatacccactcttctttctgccagtgtcttttgtgagagcaattttatctctgcccctttctcttcaccccattgtctcttctccagtcttcaaacccaaacaaaaaacatacaaagtttgctcatattcactgcagtctgagctgctgaatgttcttccagagccccttaggatttctgcacccatacttgtaaatgtttgcatcttcattttgttggtggtgatgacaaattaccccacataacttgcctctgttcctgttttagttagaaattactgtttactggagacagaatggaaaatgtatgaaggggcaacatgagaaaataggttattttgattacttccaatcatccatcgttaatcgaattcataatatagataaccaaataaaaagattatttcaatttaaacttagaatgacttataggtttttttaatctgatttccattcttattacttcttgcagcagttttcaaacttgagtctgcataggcattcatggagctagttaaaatgcggatggctgggtccccaccaccacaactcattctgatcagtggctttaactggggcctaaatatctgcactgtatccagcccacacatgagcctgatgaacttcaccagtggtaccttaaaagatagcaagaggggcagactaattagactcaacgttgtttaccatcaaaaactgtctgtacataatccagaaagagcaaagttgaatccaggctaattgaaagactgcattttaaattttttgtttcaaaagtagagcaataaagagtttttccaatgtgttatacttcccatgagctggatactacctgtttacctagatgccacttaatgtggacagcaacttttatggctgtgcacattctcaccacccccatttaaagagaggaaggagactcgcttagactcaggcagctagtgtggttgaacagagagaaccttggtctgtctggccccagcttgctctcttttaccattatatagcttcacccaagccagcgttaacagctgtagatgattttcttctaatgttctaaaacctgaagacatggggcatcttttaaccaaatgctcagctctagggaaagctaagcctcttctattttgttgaaagataaagtgttaggctgtcgatctgtattgttacaggtccctgggctggatttagcctcaggagttaaaagtatatcagccttgtgactcaccaccatgaaaccctcagatgggagtctcctaccagtatcaataatatgaatgaaaactttatatgccttctggattgaggcctctcacagctcaaagttgtaaagaaaaacccacgcaattggattttgtgaaatatattaaatatgcccagtaatgtggctcttcaaaggaatttatatactgtctgctttactgtggtgtatcattatagctcagccaaatgcgtggcctaataatttgtttcccttatgcatatccatcattaaatgtaacatgcagacaataactatttaaacacctaaatagatgattatatagctgtctgtcccacttagactgtgaactttttatgaacaatggaatctagtcatcttcatctctgtgtctcttagctcagtaaatgaatgaatatatgcatgaatgaatacatgcgtgaatgaatgggtttgcttaacatgctaagcactagactagttactgtggcaaatacagtgatacaaagaaatagaggcagatggattgagttctacaggaattttaaaaagggaagaatcactttcagttgaaacagtaaggcaaagaaaagacaaaaatactaatatttattgagggaccttcctgatagaaatatgctagagagtctacatgtataatcttcacattgactccagcagcttgctcaaggtcacacagctggcagtgagaaccccctgaggttagctaccatggtccttctgggaagtgggaagggatagcctttgaatgaatctgggagaataggtgtattctccactggaagcaatgaaacgtagagtattctggatggagagaataacataaatggaggcactgagatgaggtcgtggaatggtaagcatttcagtttggctgaaatctatgatatctctaagggattcctggaagaagaggatataatgatcaaataggtggagatagattgggagtctgtcccatctgagtaccgttttggagtttgtgcttcctctttctccctggaggcattggcaaatcattgaaggtgatctcaagccagagattcattttaagcatggctttatatacttttatacacaatagttgggggaaaaggcaaagaggtttcctgaaataggttttggcagtggggcttgaaaagaagatagggagtttgacaactttttaaaacaaatccatgcattaggcacaagttatttaaaatttttgatgttctttatattcttctagctctttctatttacatagctattactaaattaaatgtataaaagtatttttcctttttaatttgaaatagatttcatctcatatttggcagaagataataataacttgttaacttcaaggcagtcagggtaattcatccagtctcaaactgggcattcatttaaatctattgtcttagatggagatatctagtatactcactcatttaaagtagagccgtaaatcctgaagttaaataagcaaaacaaaaggcctcccaaagctgagaaaacacttgccatagagtgcacatactgtaggaaagtacaaggattattctccggctgtcacccagcactgctaacttagaattatagataaaatatgctgtaattttaataattaatagctgactatgcaaaaatattattttctcctagcttcaaccaacaggtaacatatctgcctttcatgtcaggtactgtgctaggtactaaagatataaatatgaacaaattatagtctctgtcctcaaagagctcccattctgattggacaaacaggcaagtaagccatccgagtatgatgtggaaagtgtctgataaaagcatgtctgggctattacaggagtctaacctcactttacctgagcaagttagtaaaattccctccccttcccccaaaaatgattggtttgacacttaaagatgaattggagggagaaataggaatttatcagatggacaagacggctaggcaggaaggagggtgagaaggagagggaagcagagggaggtagtatgcaccaagatccagaagcatgagggtacccctttggctgcagaataccgagtatactatagtgtagagtatgctgaaatagaagtgtgagagatatatgtggggacaaagtttttgagggccttgaacatcatttaaaagagattggaatttttatccttaaggtactagcttgtaaacagaaactttagaggcagtgaggttaatggaccagaagacgggactgttgtaagagaccttgaaggccagaactgacgcagttccaaggcagtatcaatggaacaagaggggacattaaaaaattaaaaataggctgatgaacagtgatggggtcctttaatgcatgggcttaaagtgctacatatatagctctctgaagcaagagtgcactggacaatgatggcatggcactatttaacagaagtaagcagagtctatgtgtcaggaggattgagtgtaagtctcaaatctgcccttaccagttatgtaacttctacaagtcacctctttaaacctcacttttttatataggtgtgaagatcaagattcatgctttttcttctaatatatccacttttatatgccaaaattttcctactattgaagtggtattgttggaataaatgtgatcacaaatagaatgtatttaattcattaatttattcacttgccatttattgaatttttttttctggcaacaatgggctgtcctcttggtcccccaaaataaaaagctggtgaaaattaaatgtatccacatattcaactcacaaggcaccagagagctactaaaggacttgaggggccaagatcaaaagagaagcctacagagctgggttcaacatttccacccttttatacgctgagcatttactgacttgctgagatttggactcaacatttccaccattttataatacactatgagcatttgctgagttgaaacctgcaactcagaggccaagaagctaaacaccagtttgggcagtctgcaggctggaagtatatatatttgagtttggacatcattgaagagggagaatactagtaaatcctctaggtgttatttgggaccccgaaagtcagtgtaaactaaaaatagacaaactttacaaaggccaaagcctgggtttgaattaaattaacatctgattaaattcagatcatctatccctacttgagctaactgcaagaagcaaggttatatcctttctagaggtaggtaacataatcagaagctcaagttataactaaaaggtttcatatgtaatgtctgcattgagtagaaaataagcatgtaaaatatgaataatttcaaaaatcaagagtaaaaacaaagccacagaaaagtccatatgctggtggtatttgacatgaactctaacatatctgtgattaatatggtcaacaaattataggagaagatggagaattcagcagagatctgggaagtagaaaaagaagtggggattctagaattgaaactaataactgagattaagaattgactaaatggagtaaagtcaacagcatacaatataattgaaaagagaattagagaactgaaacatagatctgaaaaatctatttatactacagccagtatacaaaaggatggaaaatacatgaaatacacaaacaagtatgagatatatggagcatggtaaagaggtctaacagaggtgtagttggagtccaagaatgagagaagagagataataaatcatacatagaagctatatttgaagagatattggccaaaagtttttcaaaacttataaaagaactcaagtgagttattttaacttttgaataatcaattaatgcaattccatattaaaaggatgcaagagaaaaattaacagttgtttacaaatgcttttgatacaacttagcacatattcatgatttttttaaaaatcatggcaaactacgagtagaaaggaacttattttgattaaggatatcaacaaagaaaaaaacataatgcaaatatcatacttaatggtgaaatattacaatgttccaattcttaccacgtttattccacagggcctatctagtgcaacaagtcaagaaaaataaatggaaaatataagaattagaaagaaagaaagctaacatcatagatgatacaattatacacatatagaatgtcaaaagaatctatagataaaatattaaaattaataagtaatttagcaaggttgctattgcagaaagtcaatacaaaactctattttatttctctaatccagaggcaaccatttagaaaataaaaattttagggaggagccaagatggccgaataggaacagctcccgtctacagctcccagcttgagcgacacagcagacggtgatttctgcatttccgtctgaggtacggggttcatctcactagggagtgccagtcagtgggcgcaggacagtgggtgccgcgcaccatgcacgagctgaagcagggcaaggcattgcctcactcgggaagtgcaaggggtcagggagttccctttcctagtcaaagaaaggggtgacagcacctggaaaatcgggtgactcccacccgaatattgcgcttttccgacgggcttaaaaaacagcacaccagattatatcccgcacctggctcggagggtcctacgcccacggagtctcactgattgctagcacagcagtctgagatcaaactgcaaggctgcagcgaggctgggggaggggcgcccgccattgcccaggcttgcttaggtaagcaaagcagccgggaagctcgaactgggtggagcccaccacagctcaaggaggcctgcctgcctctgtaggctccacctctgggggcagggaacagacaaaaagacagcagtaacctctgcagacttaaatgtccctgtctgacagctttgaagagagcagtggttctcccagcacgcagctggagacctgagaacgggcagactgcctccttaagtgggtccctgacccctgaaccccgagcagcctaactgagaggcaccccccagcaggggcagactgacacctcacacagacctgcagctgagggtcctgtctgttagaaggaaaactaacaaacagaaaggacatccacaccaaaatcccatctgtacatcaccatcatcaaagaccaaaagtagataaaaccacaaagatggggaaaaaacagagcagaaaaactggaaactctgaaacgcagagcgcctctcctcctccaaaggaacggagttcctcaccagcaacggaacaaagctggacggagaatgactttgaagagctgagagaagaaggcttcagacgatcaaattactccgagctacgggaggacattcaaaccaaaggcaaagaagttgaaaactttgaaaaacatttagaagaatgtataattagaataaccaatacagagaagtgcttaaaggagctgatggagctgaaaaccaaggctcgagaactacgtgaagaatgcagaagcctcaggagccgatgcgatcacctagaagaaagggtatcagcgatggaagatgagatgaatgaaatgaagtgagaagggaagattagagaaaaaagaataaaaagaaacgaacaaagcctccaagaaatatgggactatgtgaaaagaccaaatctacgtctgattggtgtacctgaaagtgacggggagaatggaaccaagttgaaaaacactctgcaggatattatccaggagaactcccccaatctagcaaggcaggccaacattcagattcaggaaatacagagaacgccacaaagatactcctcgagaagagcaactccaagacacataattgtcagattcaccaaagttgaaatgaaggaaaaaatgttaagggcagccagagagaaaggtagggttatcctcaaagggaagcccatcagactaacagcggatctcttggcagaaactctacaagccagaagagagtgggggccaatattcaacattcttaaagaaaagaattttcaacccagaatttcatatccagccaaactaagcttcataagtgaaggagaaataaaatactttacagacaagcaaatgctgagagattttgtcaccaccaggcctgccctaaaagagctcttgaaggaagtgctaaacatggaaaggaaaaaccagtaccagccactgcaaaatcatgccaaaatgtaaagaccatcgagactaggaagaaactgcatcaactaacgagcaaaatcaccagctaacatcataatgacaggaacaaattcacacataacaatattaactttaaatgtaaatggactaaatgctccaattaaaagacacagactggcaaattggataaagagtcaagacccatcagtgtgctgtattcaggaaacccatctcacctgcagagacacacatagactcaaaataaaaggatggaggaagatctacctagcaaatggaaaacaaaaaaaggcaggggttgcaatcctagtctctgataaaacagactttaaaccaacaaagatcaaaagagacaaagaaggccattacataatggtaaagggatcaattcaacaagaagagctaactatcctaaatatatgtgcacccaatacaggagcacccagattcataaagcaagtcctgagtgacctacaaagagacttagactcccacacattaataatgggagactttaacacctcactgtcaacattagacagatcaacgagagagaaagtcaacaaggatacccaggaattgaactcagctctgcaccaaggagacctaatagacatctacagaactctccaccccaaatcaacagaatatacatttttttcagcaccacaccacacctattccaaaattgaccacatagttggaagcaaagctctcctcagcaaatgtaaaagaacagaaattataacaaactatctctcagaccacagtgcaatcaaactagaactcaggattaagaatctcactcaaaaccgctcaactacatggaaactgaacaacctgctcctgaatgactactgggtacataacgaaatgaaggcagaaataaagatcttctttgaaaccaacgagaacaaagacacaacataccagaatctctgggatgcattcaaagcagtgtgtagagggaaatttatagcactaaatgcccacaagagaaagcaggaaagatccaaaattgacaccgtaacatcacaattaaaagaactagaaaagcaagagcaaacacattcaaaagctagcagaaggcaagaaataactaaaatcacagcagaactgaaggaaatcaagacacaaaaaacccttcaaaaaattaatgaatccaggagctggttttttgaaaggatcaacaaaattgatagacctctagcaagagtaataaggaaaaaaataagaatcaaatagatgcaataaaaaatgataaaggggatatcaccaccgatcccacagaaatacaaactaccatcagagaatactacaaacacctctctgcaaataaactagaaaatctagaagaaatggataaattcctcgacacatacactttcccaagactaaaccaggaagaagttgaatctctgaatagaccaataacaggctctgaaattgtgtcaataatcaatagcttaccaaccaaaaaaagtccaggaccagatggattcacagccgaattctaccagaggtacaaggagtaagtggtaccattccttctgaaactattccaatcaatagaaaaagaaggtatcctccctaactcattttatgaggccagcatcatcctgataccaaagccaggcagagacacaaccaaaaaagagaattttagaccaatatccttgatgaacactgatgcaaaaatcctcggtaaaatactggcaaaccgaatccagcagcacatcaaaaagcttatccagcagcacatcaaaaagcttatccaccatgatcaagtgggcttcatccctgggatgcaaggctggttcaatataggtaaatcaaaaaatataatccagcatatacagaaccaaagacaaaaaccacatgattatctcaatagatgcaggcctttgacaaaattcaacaacccttcatgctaaaaactctcaataaattagatattgatgggacatatttcaaaataataagagctatttatgacaaacccacagccaatatcatactgaatgggcaaaaactggaagcattccctttgaaaactggcacaagacagggatgccctctctcaccactcctattcaacatagtgttggaagttctggccagggcaatcaggtaggagaaggaaataaagggtattcaattaggaaaagaggaagtcaaattgtccctgtttgcagatgacatgattgtatatctagaaaaccccattgtctcagcccaaaatctccttaagctgataagcaacttcagcaaagtctcaggatacaaaatcaatgtgcaaaaatcacaagcattcttatacaccaataacagacaaacagagatccaaatcatgagtgaactcccattcacaattgcttcaaagagaataaaatagctaggaatccaacttacaagggatgtgaaggacctcttcaaggagaactacaaaccactgctcaaggaaataaaagaggacacaaacaaatggaagaacattccatgctcgtggataggaagaatcaatatcatgaaaatggccatactgcccaaggtaatttacagattcaatgccatccccatcaagctaccaatgactttcttcacagaattggaaaaaactactttaaacttcatatggaaccaaaaagagcccgcatcaccaagtcaatcctaaaccaaaagaacaaagctggaggcatcacgctacctgacttcaagctatactacaagggtacagtaaccaaaacagcatggtactggtaccaaaacagaaatatagatcaatggaacagaacagagccctcagaaataacgccgcatatctacaactatctgatctttgacaaacctgagaaaaacaagcaatggggaaaggattccctatttaataaatggtgctgggaaaactggctagccatatggagaaagctgaaactagattccttccttacaccttatacaaaaatcaattcaagatggattaaagacttaaacgttagacctaaaaccataaaaatcctagaggaaaacctaggcattaccattcagaacataggcatgggcaaggacttcatgtctaaaacaccaaaagcaatggcaacaaaagccaaaattgacaaatgggatctcattaaactaaagagcttctgcacagcaaaagaaactaccatcagactgaacaggcaacctacaaaatgggagaaaattttcacaacctgctcatctgacaaagggctaatatccagaatctacaatgaactcaaacaaatttacgagaaaaaaacaaccccatgaaaaagtgggcgagggacataaacagacacttctcaaaagaagacatttatgcagccaaaacacacatgaaaaaatgctcaccatcactggccatcagagaaatgcaaatcaaaaccacaatgagataccatctcacaccagttagaatggcaatcattaaaaagtcaggaaacaacaggtgctggagaggatgtggagaaataggaacacttttacactgttggtgggactgtaaactagttgaaccattgtggaagtcagcgtggcgattcctcagggatctagaactagaaataccatttgacccagccatcccattactgggtatatacccaaaggactataaatcatgctgctataaagacacatgcacacgtatgtttattgtggcattattcacaatagcaaagacttggaaccaacccaaatgtccaacaatgatagactggattaagaaaatgtggcacatatacaccatggaatactatgcagccataaaaaaggatgagttcatgtcctttgttagggacatggatgaaattggaaatcatcattctcagtaaactatagcaagaacaaaaaaccaaataccgcatattctcactcataggtgggaattgaacaatgagaacacatggacacaggaaggggaacatcacactttggggactgttgtggggtggggggaggggggagggatagcattgggagatatacctaatgctagatgaggagttagtacgtgcagcgcaccaacatggcacgtatatgcatatgtaactaacctgcacattgtgcacatgtaccctaaaacttaaagtataataataataaaataaataaaaatgtttaaatagcatgatttacaataaaataaaaatattaagtacctaggaaggaagatgtgtaagacatctatgcagaaaggtataaaacattgagagtaactaaagaagtcataaataaatcgagggatatatgatgttcattgattggaaaacagtattataaatgtgacagtttcttcccggttgttctatagattcagtgtacttcagttcagcattctagcagatttgtgtgtaagaggatggaaattggtagacatcctaaaacttagatggaaaggatcaataataagacagtcttgaaaaagaacaaagttgggaaaactccataatgccagatagcagaacatattacgaagtaattaagaatggtattgagggaaggacagacaacccagaggaaaacagattaaggagcccagaaacaaactcacacatgtatggacagttaatttgtggcaaagatgccgttgccagagctgtaaggaagcaatgtatttttcagtgaaatagtaccctgccgattggttatcactatggcagaaattgaattttggcccttctccttatactatgcatacaaatacattccaaacagattaaaaacttaagtatgaaatttaaaaaaataaagttcctaaaagacaaggtcttcatgactttgagatagacaattttcctaaataggacattaatgtaagtacaaccataaagaaaaggattggtaaataagactatgttaaaataagaaacttcttttcatcaaaagcttccattaaaagagtgaaaatgcaagccacaaagtggaaggaaatagttgcaatgcatataacaaaagatgtgtatccagagtatgtaaagaatgtctacacattaatgagaaaagaacaattattttgacagaacaatggttaaatgtgtataaatgtgtgcatatatacatttgagcagctttgcagaaaagaggatatacaaatggacaataagatacgaaaaattgtccagccttgttagtcattaggaaagtccaaattaaaaccatactatgatatcactacacaccctgcaggttggctaaaatcaaacggtttgataatgccaagtattgatggggatatcaaacacctgaaatgctcaagcattgatgtggaaatatgaccacactttgggaaagagtttggcagtatcatgataggctatgattcagcagtcctattcttagacatatatccaacagaaatgtgtaccagaaaaaatacgtatatagtaatacatgtaaaaccattatttgcaataggcaaaaactgcaaacccccagttcccatcaataatagaattcatcaatgtttggtatattcgtggagtaaaggattttatggcaacaaaaatgtacaaaatattgctacatgcagcagtgtggttgaatctcacaaacatgggtgactgaagctggcacaaagaaaatacaccgaatggtttaaaaattaagcaaatcctgtggtgtagacatctggacagtggttatctctggcaaggcatggtatttggaaaaggacatgaggtttatttcttgatctggataggtgtgtttactttgtaagactccactaaattctatacttaaaatctgtagctttttaatgtaggttatacttcattgataaggtttattaaaaatatcaaaggctctgggccgccctgtgctaggcactgggaatgcagacatgagtatgaaataacctggctctgaagaacggagaggaggaggtgagtggtaattaataaacaattagagaaggagtttgttagaagtgaagtcagggtgtgtcactttatatgtcagcacacaaaggagcaactcccaactcaacacacttcctgcctgtattaggtgcttcataaatgttaaattctactcccaccttgctatactcataatcatgagtaatcaagtaagggaaaaattatgttatgaatcctcttttttagtgcacaatccatgttagtgatagtggtggcaagtaggcttttttatttgtctgtttgtttgtttgttttttgatgtctttaacagtgagccttcctcaaacaatgtattagatagaattgcaacttcctcagctgaaattatttcatcagtgattactttctccatggaatgttaatacattgagtttctcttgtatatataaccagggattctgagcctctttcatctctgccttgggccacacagccccatagaaagatgatggaagggagaagaagggaagaacacctgccagcctgccagaatttcggctatagattggcaagcagacagctgaatggagggaggatatggacaatgaaaaggaccatctaacttgagggcacagtgcccaccgacagcacagcaggtgctgccaggcctgtacagagctggaaatcctggcaagatggtagctgctccatcttgtctggcctagttactgcctctggcccatgctgaagggagtctggggagttaccattccaaagaactcacaagaaaacagaactgacttggatatattccaggtttgcctagtggtacttcaaaatggtagattgaatgttattttaaaagtcattttaaaattatttcctttgaaatacagaatttaataggagaaaaatcagaaggagaatgaaaaataatatggatatgcagaatatatccgaaagaaatgtgtacttcaatgtaccaaaaatatgtacagggatacagataacaccatttcaacagcttaatggttagaaagaagtatgatttctggagccagactacctaagtttatattccatgctgtcacctactgtctttgtgatcatgtgtcagttactgaacgtgctgagtctaaatatttcatctccaaaatgggcatcatcatagcagttgtaagaattaaataagttaatttacctaaaacactcaaaacagcacctgtcctgcgtaaatactacacaactactagctgctgctgatgataacagctaagccatttttgtggctgagagtcagcagccacagccagggtggaggagatccttgtaatcataaggtcagaggaaagagggcctcagtaaagaaggcttcttaggcccatacagcgggaattacttcttgccaaaaggcttgtttgtcctctcttgaagccatgattagtctgcctctgccatgtcgttggctcctcaggagattacaagctctctgaggacagagattacattttttttcaagtattatttccccagcagtgctgagcacagtacctgatgtaaagttgtgctctgtaaatgtttactgaattgaatccttctaaacagaggagggagatactattaatcagggctgaacgtgtgacagcactgttctttcaagccaagactatatgtatgttctttactttttttttttttttttttttttttttttttgagatggagtttcactcttgttgcccaggctggagtgcgatggcacgatcttggctcactgcaacctccgcctcccgggttcaagcatttctgtctcagcgtcccgagtacctgggattacaggcatgcaccaccacgcccggctaattttgtatttttagtagagatggggtttctccatgttggtcaggctggtctcgagctcccaatctcaggtgatctgcctgccttggcctcccaaagtgccgggattacaggcatgagccaacacacctggctttttttacttttaaatcatcatttcccttttagagatgggatgtcagaggcccaaaaaactcagttcatttgcgtgaggtcatgtaaatggtgatatctggaagtgtctccctcaaagtcagtgccctccctcacaggcactcattccctaaggcacctaggatgggcacagagaaaggagaaccaagcttggctggggctgctgtccagagaaggtgggcaggtgtcaagagcaggtgcagaggtggagaggagagctaaatcttgtcctcagtagaagcagagatgtcatttcaactgcaggttttgaaaaatgtcagtgcatacttcatgagattttctgaattcatttttactctcatcttctacactatttatctaagctgttgttctctttgaaactatgtcagccacatgtcattcattgtgccacaaccctgggctttttatcctgcttagggttttgttttgttttgcttgttttttctccccagctgctctgcctatcacttaattctctgagccctctggcctgagtcttatccggtggtgtgggtcaccttacaatcccgtttctagtctcctgggagtagtggtggcaggcgagggatagaatcaacatccaggttcagaatctatttgtcttttttggtcttattgtccgaagcttgagtcaaggataaattaatcagtctagaggtgggagagccctctaaccctccccagggaaaatcctagcctttatagaaacttggcctggttttggctctcagatttaattccaagctgtgaagaatctgtcaatgttcaactaaccctgacaaaacctttggaagtttctgttgcaaccgaaactcttatcacaggaggtggtactgagcttggcatcagaggttggagagagaagagagctagcctgctaattaatattttttttccttaaatttcaggcttttttttttagtttaaatgttctaaagaacctgtcctgtcacttcccatctgtttcctggtgttttcctcaagcatctcactggtttgttttatgtttttgaggggattatctggggtgctgattactttccctaccttcaaggagcctttgaataattttataaatgagaccatttgtctaggggcaagagaaggttgctgaaggcaacctagtcctgctttctcccaagagaaattgtacactaacatttgtttagtagtgcctatatcccaagtacaaggctcttgccttatacctaggatgagcaactattccagtttgccccaagataagctggggggtttccttgggtcctggaccttaaatagagtgtagacgaggagagttatcttttcttctgtctatcctaggttcatagctggggcccttttaacaaaagatagattaacaagagagaagcatacacatttatgtaatatgttttatgtgatatgggaggtatcatacagaaatgtagacccagaggaacagttaaacatgagtatttttatgttaggcttgatgaagagtagacagacatggaaaaatatgatagggcaagaagggcatgatttaatggtaataaactggggaacttagcaaagcctgttagtgcagtttcatccgtgtgatccttcatctccagatacaaggatggtgctttcctttgagtacagggagggcacctctcacatgagggtcttatgacctgcttcaggggacagtcagaaaatcctaggtttaatgacctgctttaggggagaatggtgggggaaaggtaagagtgacctctatgcctctatgattttctcagataccttcagcttaaactattcaaaatactaacatgccatattttgggatagcatgtcctgaaccccatcaagtgcagataccaggaaaaatgaccctgtaaaggaaatgccattatttccaccttacaagtgagaaaagtgagtttcgaagaggtgtgttcacttacagaagtttgcacaggaaactggtggtgagaaagaatcaaatatacatctgtcagacttcagacccagaactttacactaaccaacttcttcagaatgcagagttccatctccttcagactgtgtagctcaacagttttgtaccatctggctatttttctctactgtgtatttgactttgtctcttttgtctcagggtgtacttgaaagcctttacctccccatcttccttccctgatggctgatatacttctgcctcacctgctttaggagcccctgcctccaaccatccaaactaggtcaggggctggggctccttccttctgttagactattcagatctgagtcactggtcattcgcatagtgtcttataaatgtctgcctgtgtatttttccaccactgctagactgggatcttgtagaatacaaggaaacaactttcatctttagatttctagcacccagcatagttcctggcttataattggggatcagtaaatagctgttgaattaatcaatttataaattttcaggaagcatttgtgtgccttcgagtcacagtatttgatctatttaaggacttattccataagatgcatttgtgatgcttaggccagttctcttaatttttttttctatttttaatttttacaaagtaatttttgtgagttaacttggctgtttggattagatttcaacctgatactttaccatgcctaatgtctgagaatgagaaattgtcttttctgaagtcatagatgataatgtccaagtaatctagaggctgtgttgaagttaggaagaaaggaatttctgacatcaagtttttgctttgtcttcactgtggatttttctagttttctctaagtctcaaatttccaagctatacatattagcctacctttgagatttgatctttctgggtaggaaggagaaacaggagtgagacccagttatcagaaggtctgttctttgttctctccactcctcgcaatacaaccagcctcttgaattggtttctgattgctctaagtcatggaggagtgtggcatgaagacagaaatgatgaatgccatcccaagttaaactgcagtatgcatggtgctacatgtaattgtggcttttcatgaaataagcagattttggtttattcttaatgtttaaaatgctagcctgggttatacctactacctggtacctcattttccttattcctttgggcccgcaattattttgtcatcagttgtatagtcaaggacagaaaacagatgttccaatcaatctaagtaaacccaaataactctggcaaagcacacaccgtgctgaaatcaaatgaactgttatgccaagccttgctattaacaccaaagattggaagttgttggtagtaacatcaaaaatggtgaaaatatattgagtaaactgtcccagacattgttcccctcagttaatctccatgatagccctataagccacattctatcatcattccaattttatagatcaggagactgagacataggaaacttaagtgatttgacctacttgccagacttgaaaccaagcagtcgagttccagtgcccttgctttgaaccattacgccctaactagttcatatatctagtaaatgtctgtttacatctcatgtagaaaaagaccttccctattatcttgctctgcagagggtgggagggttggggtggggagggggcagtggcagtgtcaaggtgtgtaaaatttctctgttgacttaaagcataggatgatgatgatgatgatgatgatgatgatgatgatgatgatgattattattattattatttgagacggagtctggctctgtttcccagtgcaatggcgcgatctcggctcactgcaatctccggctcagtgcaagctctgcttcccaggttcacgccattctcctgcctcagcctcccaagtagctgggactataggtgccgccaccacgcccggctaattttttgtatttttagtagagacagggtttcactgtgttagccaggatggtctcgatctcctgacctcgtgatccaccctccttggcctcccaaagtgctgggattacaggcgtgagctaccacacccagtgcagtaaaagtaaacctactttaggatttagttggggtaagttctagaccacatttctttcaaggtcaaagcaatacttcatgaaacattgggattacctttttgacttttttttttttttttttttgagatggagtctcgctctgtggcccaggcttgaatgcagtggcgcgatctcgattcactgcatcctccacctcctgcattcaagcaattctcctgcctcagccccctgagcagcttggactacaggcgcgtgccaccatgcctagctaatttttatatttgtagtaaagacggggtttcaccatattagccaggctggtcttgaactcctgacctcatgatccacctgcctcggcctcccaaagtgctgagattacgggcataagccaccatgcccggccacctttttgactgttttactccccttcatttgctaggcttgaggttaaccctttgggtttgctttagtggcattttgacagtaagtcctgaaagagatctgagttcagctatcctattgtctaggaatagttggagttcttgtaagtagttgaaaagaaaggaactagcttctgtgaactccacgagataatgtaggataaggtagaattagagtcaggtagatctgggtgtgatatagtcccaccccgaggtcccccacaatttagtagtgtgggaccttgtagaagttgcttggaaaactttactctccttttctctatttgtaaatcaaagtgataataactaccttgcagtatcactgtgggaatcaaatatgataatatttgcaaagtgtcaagcacaaagcaatctcccaataatcaaggatcttagaacctttagtctttaccagtgatttttgacaaggtatgttgtgaggctccagtaattacattattacccatgagttgtcactcaaaaccaatcaatatttttcacctttattcatatttaagacacggagcctttgtccgtgattaaatgtgctattgttacctagaaaatgtcttgtgctttactagtatgtgacttctgccacacacattcatttattcattcattcattcatcaacaataacaacaaaaaatagtgagctactgcagtgtgaagacttgccctggcctccgtttgcttatagtgtagtagagggatttgtttgtgttgtctgtgcagacacataaactaaagttacagtgacagaatctgtagagagtcagaagatgggctacaaaggaaggaggcttggtcggttctgctggtctggggtgttttggggatgtggggagatgtgatcaggaaaggcttctgatgctgcaactgagtcttcaaaatggagttggtgttccccaggattgttatgggatgaggtgtattggtggaaaggatatcctaggcagagggagcaaagtaaacaaatgcttagtggcaaggaccaccaaatcacattcaggaataaggagaaaaggtcccaaccatatggaaccctgctcatgccaggcaattctgcaggtcgtggatggcgtatctcccatttattgagtactggtgtgttccacctaaatctcatttaattctcacagcaactttgtgggtgagtattgctatccaaattcttcagatatggaaattgaagttctaaggggtcaaggcatctttgcccaaggggatgaaagagggattcaagtctaactctgaagaagtagataaacaacaaaaacagcaataacaataataaaagtaataaaaacagcaaaggttcatatagtactaggcatgttttaacctgtaccgttcaatataatatccactagctatatgttgctacttaaatgtgaattaattaggatagaataaaaaattcagtcctcagttgtactagccacattttcagggctcaattgccacatgtgtctggtatctattgtatcagacagtgcaaatatagaacatttccatcatcacagaatgctcttattagcactgttatgggtactttacacctatattaacatatataatttttataatctgtgaggaggatactattcatattgtagagatgtggaaattgaggcataaggaagataagaaacataaagaagataagaaatcacatgatgaatgagtccttatttttaagcactgtgccataatactaactcaatatattgtgttctgtttaacataaatgaatgttagtcaaaataatggacttcagtgtctgcgtgtatgtagtctggtgttaagtcttctgcagagaacacgtctttgatatgattcttatccttccagaagcatacagttgtcaatttgcatgtataaagctggtggtcactagagagtcttctctggagcccttcctctccaggaactccagaaacctcccagccagctttggcaagaaactcactggatgggattcatcagtcagttcattcatccaaatgactgaatcaagagtctcaaacagatgtagtcttaaataatgttcaaaacccttcttatcctttttgatacttcagagaaggtgcctgaggttattaaaagagaatctttttcaagatgccaacacatcagactcaaagactgaaaatcctagttgagtccaacttctacctctaagttactaaataaactcgactaaattacttcacctttctgaaattcaatttcttcaactgtgaactggaaataaaatacacatatcacaggattttctaaggactaattgaaggttacagtgtttgaggatactttgcaagctataaagtactttatatggctataaagtgggagataattataacacaaatgcgagaactcaggatgtttttcttctatataaccttgtaagctttcaaaactgccacagcgtgataaattataggaaaatgtactcttaatcataacatttgcaaagtctcttttttattttacataaatatagtagggactcaatgcttgggtggaagtattgttggttggatgaatgggagagatgaagggagacagcatattaaataagagagctgttcatgaagttttaaatgttccttttttaacattctttttaaacattgcttgatatgaactatgtgtgttacatggagggttgggagacatttaattcattgagttagcctgtttttctgctatttgttttttagttcaacaaacatttattgagcaactgccatcagttgggcattgtgcaagtttcagggaaaacacagttgatgatgtcactgtttttttatgcctgtttcttcatctgctaatttttctccttaaacattttgaggattgcagaataaactgacactggtatggtcatatgaagggccccagcggtaccgagggctgcacttgtgtcaaattgtttcctgatgtacacatgcagcctgtgagttctctgtggatggcaaaatatgtttctccggaaagaagaaagctcctcccaccttttcttgcttttccctgcttatctctgaacctcttttctcggggatagcccatcaaagcactgtgtggccaaaggaaaaataagatgtcagctctccgactcatgtggtcttgcagtgaacatcagctatgcatggctgctgaattggggtggacattaggcagagtgtagagaacctcttgaggggaaatgaggccagtcctgcccaatatatataattttaggtaaggagatacctcagcttgtattttaggagaagcactgtgtatatactgagaatggctgaggaaggacctccatttgtaattcatttctctcattgtggggatgagagaaccagttcaaacttttaggccatttgtggcagaattggggctgaaactcttgtttttctaactcttagcccatggctctcactgagtttcatggtgaactagcacttccaagtatgttttcattatgtaagacaattataacatcataaagtgaggagtatagaaagaacataagctttggagtcagacagaacaaggtcaaatcctggcactgcttcttaaatccatgtggccttgggcaagttacctgaacactctgctctgttcttctacttctgcatctattaagaggaagaaagaatgtttaccttttatggatgttgcaaagattaaatgagagaacattcaaggagctcagcacagtacccagcctatctttgatgttgatatgtttactagaaaggaagaatccagttgtctcttgagagggggttcagatgatgatgatggtgatgatggtggtggtggagagagtgatggtagtgatgatggtgacagagctaccattaaacatctctttttaagcatttctgcaatatcacaacaaccatgtgatgttgtgattttcctcattttatagcagatccttctgtctccaaattccatccttttctcataatagcacactagttctcaggttctaagtctagatatagcagcagtgaatctgccaacccaagaagaaacaaataaatatttcctacacatttctttttccttcattttaattcccttttcgtattgactgaccctgtaacattaactttgcctgtactttatgtttatgcaaccagtaaatgtgggtgattctcaggaattccttgaacctatttatgatactgtggagcagcgtggccaactccttttctgtcaaggatctcagaatcaatatatttaagatcccaagattttgagatgtacagataagtgaacattggttgcctggctattggatttttatcttagagaaaaacctgtgagtcttggtggggaagaaccagcactttggaatcagattacctgaatgtgaatcacagcccagttccttgtgagctgcatgaccctggtgaagttactactcatttctaagcttcgattttcttatccataaaatgaggataatactaataccaatgacattagtttgttgtaagaataaaatgagacatgtatagaaagagcatgtaaaaagagctcagttaaaatgagctcatatcttgggttattcctgtacaaaagcctttgtgccctgaatggagaatcgtgtcactcaggattcactcagcaaaacacaaaccactctaattgtttaaaaaaccagtaacttaatacccaaaaatggcgatcctgatgatggaggagctgagaagggctacattccctgtgaagcaaatcagagatcagtgaaatggaagcagctaccatccccaggctggagggactaaggagggaggagggaggtggtgttctcatagtctgagggcaggggacaccagccgatgctggagccatggcagccctgtcaacagagcccgagtggtggaggggaagcagctgctgcctggcacagaagagaagtagataggctcttgcttccccttgcctgcaggggtagccccacaatactgagcagagcagcggacttgatctgaaaacacataggccaaggattcttgcaggctaaagtctcagacttctattgcctggttgtggatatgtaactactgtgataactaacacagaaagtttggaagagtcttacttccccctgttgctagacctctgaacaatagcagagattcacaggttgctgtgccccagaaggtagaatttggaaaaagcagtggaaaaccctcgaaagctgtaagaggcctgtctctggcctttttctcacattactttctagcaagtatctgagcagccagtgccttcagtatctggggatttgtggtctgatgagacattcccaccctgccgtttacctggctaacttctgcagaattgagtatagactgaacttccttgggcccctataggtgggttagctgcctttgtggcccctcctgtgatacactgatttccctgcactgaaatactccatttaggcttccatctccttcccaccagactgtgagcagggacttgtcttcttcatccttgcatccccaagcatttgtactcttacttcctgtattgagctagctactgtggtaggtcctgggctatgcatgtaagtaagagtgccagctactagcaacttttattatagaagggaggcagatgggatatatgatgttttaaaattacccatgtcttttgtgctagggaagtccattgcatgagactatttaacagggagaatcgtctgtcctagagggtcagggaagccctataattaggagtcggcctgacagcgaggttgggggaatggcattccaggcagagggaagagcaaatgtgaaggtcttgaggtgggaaacagcattaaggattagagattgagagcaaacgtggcattgcctgggagctgatgaggtcagcaggacctgttctctcctgtgtccaagtctctgcgtcctgcctgagcactttccacccccagctttgtgttgtagtcctgcaagtctgcgtgtttgtggcttccacatcacacctagtatatatcgttttgtgcatagaaggggcttattggatatttgaacaaatgaatacaattccaggccctaaagagtctttctagctttcttgtcatatttataactttagttgccctgcaagtatcaaggaatacgagctctatggggaagaagcctgaatttataccatttatgggaaaccctctgctatttggcattctgttactaggaactcgctctcagtcattctctccttcacaattggagttctgcgataagtagtagtaagaatggtgacctagggatgccagaaagattcagtcatcagaccatcctttgcttttgcttctttgggactgagatgtgatgtgttaaaccagattccatttggctccgctccttcttagcagtgaccttgggcaagtcagttaacctctgcagaccttagtttctcctctgatgtctaacattaataatatctatgatagtgttaaaatgagaccatgtatgcaaatatgtagcatagtgcctggtatttagtgagcagaaaataactgatagctgctgcttttattatgacaatcacaattactgccattattataacgttgggtgccatacattgaccagaacaaagcaaaatctgagcaggcttccgaggtttcctatgcaggcaagtatgccctttgggtttctccttgagactgccctacacacaggacccttcctccatgttgtttgactattaaaaagaagatttgttaatgcttgtttttagctttctctccctctttttttatgtgttaaagaggatttgtttttgttttcctttctcacaggagtgattggggcagatgtgagagggcacggcctcatctgtgaggggcagccagtgacgtcacggctggctgtcatctgtggaacgtcttcttgtcacatgggggtgagtccactgagcacaaaggcaaggccaccacacagcaggaggtagcctggaaggagaccctgagtgctggcttcttcaccctttcacttctttcctcttttccctgcctgccccttgtgctttgtctagccagaagcccagctccccactctacctcccttgcttaacatttgctggatctttttccaggggccaaattcttagtaagcatgaaaaggattgagtgctccctttgacgtcaccctggccagagagcccaggcatgaatggtgacatctgatcctaaggtgacaaagtctagctcccccagactgatctgtccctaatgggtagcggggtcttctcggcaaagagtgtctgttttccttggccagggaactctctctcaatcaatataaatccatctccctgggagcgtcctgatgatctatagaattagcctgcgtatcatgacttcaaaagaacactgataagcaattttcactttgttaatttttctccatgaattagtgaaaaggctttctccaagattgcagttaaaatttagtgcctgccctaaaatttatatcttctttaaatgcatgagtctgaaagcattccattccgataagtacccatttctaccatatttttatttaaaagtcattactctgttaaacttaaatcgacgactctttggaattttcccagataagtataatagagggcagagtgggggaggagcagggagatgagcagagattagagcgggacacagcccagggcagaaccaaagcagctatggaggaaattaagtgggatgtgagactgttttgcaactgtagggacccctgagcctttttaccatcagatattctagttcagttgatataaatacatgtacttacttatcaatccctgctcttgtgctaaactgtggatataagaatgacatcggctcagtgggatgagatgaagttataacaggtattagaatataatgtgaggccccccaatgtagatacaaattgaactcatgatactaagcatctgttatgtgccaagcaatatgcgaggtattcttgcacatggcatcccattttctatggctgagggagccagcccgagtggtttccagtcccacttcctcagtttactaagtgtgggcctttgggcaaggtacttaaactctctgggtcccagattcctcatctacaatatgtagagagtgacagcacctgtcagagtgctgcaagaattaaatgaggtgatactaagtgctccacatgcagtaagcacatcacaagggctcactcttaatcactaggactgttgttgttactgagcagaaagcaaacagtggctgactctgcctgggagggtgcagggtgatagaatcttcttgaggtgacatttgtgctggactttaaggaaatagatttccttctgtttgggctctgggcagtcttgaatggaatttttctaagtttaaaaattgcagcatatttggccagacacagtggctcacgcctgtaatcccagcactttgggaggccgaggtgggtggatcacctgaggtcaagagttcaagaccagcctggccaacatggtgaaaccccgtctctactacaaatacaaaaaattagccgggcgtggtggcaggcacctgtaattccagctgcttgggaggctgaggcaggagaattgcttgaacccagaaggcagaggttgcagcaagccgagatagtgccattgcactccagcctgggcaacaagagcgacactccatctcaaaaataataataataatttcagcatatttcttctgctcagcagcccttttgtaaggctcagctgtccctgaagggagagatctgcagaggcctgaggcctctttaagccagaaggcaccagcccaggagccagcccttctttcccttgatatgagtctacacttgttagattgtcttcactgaatactgatttaatcctgtttaaattatctcttattttcacagggatacatctaatcaggcttctcctgggagatctgaatctcaggcatttttaccccactcaattcagatttctgaacagaagcaaatctaaatggatgcaagtgtctctgtgatggcctgcttcttagtcttactgtctcttaatggagatgaggctggctttccctacccatttaatgtacacatttgggacctaaagcgtagaaaagtccagtaattttcccaaagtcacaaagctttgaagttcttgagctaagaactgaaatctaactctgattccaaagctcatactcctccttgcctccctgaattgtgcatgaagatgatgtacccatagaggaatggtgagaacatgggcttttacattgtccagaggcaagcttgaacatctgctcatgcatgttttggccctctgacctgagtgagctacttaacttctctaagcttcagattcttcatccatcaaattggggataatgatgccagtctcacagggttgttgagtaacatgcattatgtaggtttgtacctagcacacagcagacactcaaaaatggtggagattgttattaaactttcctagtgatgtaaacggctcacatgaagcaactgtttgggctttaacgagtttgatgggcagctgcagttggttgcgatgaatgagggccataaaaggccagtttatgatggctgtgttgtgctggaaataaagtccccacccccatcctgctttgtacttgggagtgggaagggaccctctgggccaaggggattaatcatcagctttaatgttatgtcatgagggtgagactgtggtcatgctggcatgggaaagtgcctttgatctcctcaggtgctgggaacccagcaacaataacacctttgtgaggtctaggagaggtgcaggtctgaggaaacactcccagggagactcaaggaccccctttgttgtggttctggcaaataaaaccgccactgtgaggaaaaattaaccaaacagaacacagggaccaaagggtgatgcgggcttttcaaaaagtggttttcagcatgatctgaaggatcctctttcttcctgtctgcttacttctgatgtttccaatttagtagattgagacaaaattcccaggaacgttttgtgcttgatccaggttgcctctttctagatcacccaaaaagaataaatgaatgaacgaatgaccacataagtgagtattggtaaatacttagaagcttcgtacctccaggttcctgttgcttccaggaatctggagaaaaagcctgaggttgaacataagacatgttaataaggcctttgatattttagaagatacaagcatgggctgcacatttatcttccttgtgggtgatttaattaacaggggaaaaatgccattctttttttaactccatgaaagcagagctgcttgttcagagttaattactaccaagtcaccaaaaccccagataatacacagcaggggttagccagaggttgaaaagtcatggggtaagatggagctgatccttgccattgtactgacatccttttcttgagctgtcaggttgggttgtaacttggcaacttgtcttccagttagcatgtcagatggggacaggaccctgggggggtcggggtagggagaaacactgaggaggtaagatttgagcagaacaatacctgaagagagctgggaactacatctgcatcttaaatcgctcagaactgaagttttttcagtcttaatattgagatagtggttctctatcattgaagggatgtggagactcaaagacataggctcatacgctgcccccaccacttactgtgtgaatttaggcaggatgcttcatctttcagtgcctcagtttctgcatctgttaaatgtgagtgatagtatttacccataaagttttgttcaggttcaaattaggccatctttgtaaatgacttggcactgtacctggcacaaaataccaaatatgatattgttattaaaaatgagttgttaatcacatgaacaatccatgtggttatggactagaattagagacatcagtatgaactcatattgggggaacccacccccaatatttcaacgtaggttctttctattttccgtaagtgtcagccggctgagaaataaagagaaagagtacaacgagaggaattttacagctgggctgctgggggtgacatcacatatcagtaggaccatgatgcccacctgagccttaaatccagcaagttttattaaggatttcaaaaggggagggggtgcaagaacagggagtaggtcacaagatcacatgcttcaaaggcaaaaaggagaacagagatcacatacttctgaggaaacagtacaagggcaaattcagaactactgataagtgtctatgttcagctgtgcatgtattgtcttgataaacatcttaaacaacagaaaacagggttcaagagcagagaaccgatctgacctcaaatttaccagggtgggttttttccccaccctaataagcctagggtactgcaggagaccagggcatatttcagtccttatctcaacctcataagacagacactcccagagtggcttttatagacctccccccaggaatgcattccttccccagggtattaattattaatattctttgctgggaaaataatttagcgatatcttccctacctgcacatctgttttaggctgtctgcaagaagaaaaatatggctctttttgcccgaccccacaggcagtcagaccttatggttgtcttcctatgttccctaaaatcactgttattctgttctttttccaggtgcactgatttcatattgttcaaacacacatcttttacaatcaatttgtacagttaacacaatagtggtcctgaggtgaagtacattctcagcttatgaagataacagggttaagagattaaagtaaagacaggcataagaaattattaaagtattaattttgggaactgataaatgtccatattaaaatgaaatcttcacaatttatgttcagagattgaagtaaagattggcgtaagaaattataaaagtattatttgggaactgatatatgtccatattaaaatgaaatcttcacaatttatgttcctctgctgcagctccagccagtcccactgtttgaggtccctgacttcctgaaacaaactcatatttagtttaacatagatgcagatggatgcatatagaaatagttatggatatatatacatatacaggttagtaaacacatatttatttcctggctctgttagctgagatggtctagaaataaggatacctcaagagctagtttttacaagcacatagtgtccagatcatggtatctaataccattatccaatacaaagaaccaggactccttggagaaatagttgattttaggattggaataggaaatatacaagatgagcttggagcatttgcagtgccagaaagttaggaagttctcaacaaaaaagatgagaatatgtcacagggagccaactgtgggagctcccactagccaaaactggaacaatttaagcagtaaaatgaagtattatgaattataactcaaagtataacataaatatccataagaccatactgacataaattattttgaataaataaatcaatgaaaagaagagagacatctcccatgcagaaagattccaaataatttatataaatgttccaccatcaaggaggtggagcataactttccactccttaagtgtgggctgcacatagcgatttccttccacaaaatatggtatggaaaacgggggaagagtaattttacattggagaaatatgagaaacagcatccacgtgacaaggtcaacatcaacaatgataagtcatgttgatagtacgtacccttgatatgatgtaatgaaaatgacactttgtctctgttgtgttcatcccccaatcctataagcccagtctaattaccaggaaaacaccaaacagatcttagttaagggacatcctataaaatacttgaccagtatttctcaaagctgtcatccaggtcatcaaaaaacagggaaagtcagagaaactatcacagccaagaggaacctaaagagccatgataactaaatgtaatatggtatcctggatgggatcctggagcagagaaagaacattaggtaaaatctaaggaaatctgaataaagtatggtcttcagttcatgataatatatcagtgtcattcactgtgacatatatacttgacaagatagtaatgataggggaaatgtaactggatgtgaggtatatatgatctttacaaccatcttatattgtaaaactattctaaaatttaaaatttatttttaaaatattcattaactattcactcataaagaaaacttttttttttaatttacctggctaagtgctaaaagtcttcataagataaaatgtcatgcctgccttcaaagagctcaggcacattgagaaagacagacagaaaaaggagatactacaatacaaaatggtaactactatagttaatgcatggctggagtgtggtggaagtaggaagaaggggctgtcccaagtcttgggtagatgaggaggttttcctataggaagagatatttgcaggatcatggcttccccgcccccactgagacactgttcctgccagcccaatttctgtagtaggccctttcctcagtcttctccactttgtttttctttgctgtgtccacaaagcctcacagctgacttcccctgaggcctgagcaggatgtgggtgtgtatgagccctttgggagggcaccacagggagacagcacagtcatgtattatgaactgatggtcttctgttactagctgagaagagtgggcaagtgggaccagtttctctgtcatggtctctttaacaagtgacattggcagaagttaccagaggggtggagtgggatgggattccacacggtacagtagaccactgttacacctaacaatgaaagtgctgaggtgctgctcagaaggtgcctcgcttcctctttgtttaccaggacctgttgtcgtcagccctctaggaaccagcattctcaggacactctctgtgtcaagactagctctcagactgcatgttttgaaaacaaagtatatgctaggcattgattcggcgaggagagggttgatgtggttcagtggacaatgagagacagactgtgcactcaagaagctcaaggtagcttgtttttcaagacatttgagaaacatagaaacattatgctggactgagtatgtttaatatctctgaacccaggcagtagcaccctttcctcaatcctcatgaggagataagcagtaatactacttgctaccatctgttgaccacggaccatgtactaagcaccttactaaaactttgtatcatgtaaatagctcaacaatcctaccaagtaggcaccatactgtccctcattttacaagttaggagactgaggcaaagagtggttaagtgggtcacacaatgtgtaggaatgcaacactttgagccctctggaagactgaccagagagtccttcctcctccctttcagctgtatagcttccctcaaaggcctagaggaaagggagaacagactcaattaaaagggccaaacatgagcaaatgtttgaacagacatttcaccaaaggagaaatttgaatgaaaagcactggtcattagggaaatgcaaattaaaaccacagtaagattctctactactcctactcatcttagaatggctgaagatgtgaggaactgtagctctcacacaccactggtgggaatgtaaaatgatgcaaccattttggaaaatggtttagcagttacaaagttaacatattcctactacgtgatctagccattccactcttacaaaagcatgtattcatacaaaaatttgtacagtaatgttcataccaacaaataaagctttgtaatagtccagcactggaaacaaccgagatatctttcaagagtgaatagatcaactcttggtgtatcaagagaacaaaatactactaagcagtaaaagggaatgaaccataatataaggtacaacatggattaatcacacaaaataattatgctgagtgacagaagccattaattcttccaggcaacttgcagtcttttgtggaaaagtgggctcaggccagctgataggtagattccccctaaaggcttttgttcctggccttctgagatgctttgtttcacctgactttgccatgttcctggtggactttcagaaacatgaggccagatatccctgcccagcttttatagaaatggaatgtctggatcacagggtagatgtaagttttaagaaactgccaaactgttttccaaagtcactgtaccagaaacgaatgcaaactttcttgaataaaaaatagttccattatttaaattcttgcaaaagcaaactaatatatagtgacaaaaagcagatcagtagttgcctggaatcatgaaatgggcacaacaagggccaggaaagtaggatcaaaaaggggcacaaggaaagatttgggtatgtttatcttgattgtggtaataacttcactgatctatgctatgtcaaaactttccaaatcagacatcttaaatatgtacagtttattgaaagctattagctcaataatgctttttaaaaacagaaaaaagatcgattttgtatctggagactttactgaagttgcttatacacctaaggaattttaaggctgagatgatggggttttctaaatatacaattatgtcatctgcaaaccgagataatttgacttcctctcttcttatttgaataccctttatttctttctcttgcctgattgccctggccagaacttccaatagtatgttgaataggagtggtgagagagggcatccttgtcttgtgccggttttcaaagggaatgcttccagcttttgcccactcactatgatattggctgcgggtttgtcataaatagctcttcttgttttgagatatgttcattcaatacctagtttatggattgtttttagcatgaaggggtgttgaattttattggaggccttttctgcatctattgagataatcatgtggtttttgtcattggttctgtttatgtgacgggttacaccaataatagagagtcaaatcatgagtgaactcccattcacaattgctacaaagagaataaaatacctaggtatacaacttacaggggatatgaaggacctcttcaaggagaactacaaaccactgctcaaggaaataagagaggacacaaacaaatggaaaaacattccatgctcatggataggaagaatcaatatcgtgaaaatggccatactgctcaaaataatttatagattcaatgctattcccatcaaactaccattgactttcttcacacaattagaaaaaactactttaaatttcatatggaaccaaaaaagagcctgtatagccaagacaatcctaagccaaaagaacaaagctagaggcatcatgctccctgacttcaaactctactacaaggctacagtaaccaaaacagtatggtactggtaccaaaacagatatgtagacccatggaacagaagagaggcctcagaaataacaccacacatctacaaccatctgatcattgacaaacctgacaaaaacaaggaatggggaaagattccctatttaataaatggtgttgggaaaactggctagccatatgcagaaaactgaaactggaccccttccttacaccttatacaaaaattaactcaagatggattaaagatttaaacataagacctgaaaccgtaaaaaacctagaagaaaacctaggcagtaccattcaggatgtaggcatggacaaagacttcatgactaaaacaccaaaagcaatggcaacaaaagccaaaatagacaaatgggatctaattaaactaaagagcatctgcacagtcaaaaaagctgtcatcagagtgaacgggcaacctacaaattgggagaaaaattttgcagtatctccatctaacaactgttcagaaatcagttagagagcctctggccttagtgtctttgggctctaaccacagaaaagccacccttcagaccatgctacgtttttagagctgtgttctctgggtgatgtctataacagcactttacagcttcctcagaacaccaaagaaaacgttccccagaggcaaagggtgtggcctgggcctggggggcccatgtttcatccaggaccatgaggcactgcacagtgtttgtttgttagaggagcagaggatgctcaaaatcattagtcgttagggaaatgcaagtgaaagacacagtgagatccactccacacttactagaatggctgaagttgtggtgataatgtggggaactggaactcacatgccactggcaggaatgtcaaatgatgcaacgactttggaaaacattttagcagtttcataaaacctactctaccctgtgatccagacattccatttctataaaagccaggcagggatatctggccccatgtttctggaaacccactaggaacacggcaaagtcaggtgaaacaaggcatctcagaaggtcaggaacaaaagcctttagggggaatctatctatcagatggcctgagcccagttttccacaaaagactgcaagttgcctggaagaatggtgtaagttcttcctctagaagtagaggacgaaaatggtgcagctgtgttttagctccctcctgattggcagcatgggttcttctcccaagggtacaagggaatggggtgggatgggggtggtatatgggagtggaaagttctggaggactgccttgattagcagcaatgacaataacagctaatatttattatatgtttatcatggtctatttggatttttttaaccctcataataaccttatacagttgtcagaattatcttaccaatttatggggactgaaactgaggctcagagagacaagtgacttatccaaggctgtctagctagtaagtcctttctttttttttaagacagagtcttgtcgcactcttgctcaggctggggtgcaggtgcgccatctcggctcactgcaagctctgcctcccgggttcacgccagtctcctgcctcagcctcctgagtagctgggactataggcacccgccaccatgcccggctaattttttgtatttttagtagagacggggtttcaccgcgttagccaggatggtctcgatctcctgacattgtgatccacccgcctaagcctcccaaagtgctgggattacaggcgtgagccaccgcgcctggccgtaagtcttacagataggtttgccactcaggcagttggattccagagctcagactctcaacaataagcagaatgatgagacacaggctgtgggatgggttgaccataaacacacgtgttttgtgggaatgaggtagagtgattacacagcagatctttcccagagcctgatgagaactgcacagttaaggctggatcacagctagaccgcagtgctttcattttccctttttcccagtcttccaaatcacttcctttcaagaagccaccagcctaatgataacaataaaaataaacaacatcacttgtcaccatcatcccctgggaagagagtatttatgagactccctatttaatcttcccctgttccctgctgcgctgtggtcaagtaccaaatttggcaatgtgaagacatgcggctgacttcccaactcatgaagatgtttttctatttgtttggagagcatgatgaaaaccacattgattttttttttccttttcctatttaccacacatctgttgtgtgggtgattctgatattgtggctgctgagggttacctggcagtaaccctcagtaagaggagagggtttgtccttttccagaagtttggtgtggatgaaatagatgatgaggcagtcatggtggagccctaaccaagcattgggtcccgtgccaagtgcctgcatgcatgagctcatttagttctacatacatttagttcagaggctttagtatttatgccttgtttttctcttagtttttcatcctcttctcctattctgtttgtgtgttccaaatgtctgttttttcatacattacatttttatatcttttgaaagtactcttaagagctgtcagaagtttgaggtagtttctactctttcacttaaccaatggttagagccccaggagaaataacagtgagatcaaagaactcagaagaaccaatgggaagctttttgagcaatcagcactgaaggaatgaaattgaaagtccctacgtaattaaccatcagtggctccctactgccaatagaaaaaaaaaagttcagatgagacaatgagtggaccttctggctgtgttcttatgggtttgggatatattgcattagaataaaaccgaagtcttaaatcctaaatgaaagttactgtcagttatactgacagtgatactgtcatgtatgttgtaaatctttttgttgaaagataatttacataccatgaaatttatccccttgtatttttaaaacatctagagaactgagtatagtgatgtttgagaaagaggagacttactgcccattttttaggttacattatgggatgatactagtgtgtggtctttattacttagggagataacagaaggatatcatacaatagtacattgccatttacttgtatgtacctgacacataataggtgtccgttaaataatagatatatacatgagcataaggacagacagaaaaataccagttagcaactgtaaaggtttgttggagaagaaatcgtgccatacctatttgatttctgttctctgatggagtgaaaggctgggcagagaaagggagatacagcatataaaccaccaagttattggtcaggccttaggttctttccttgattaactgacccttcccacatgccacagcagcattggttaagtcagtcacacaattttatctgtgcacaaccgagttgtccactgaattatacctcaaagcaggccaaaaatatatatatatatgtaaaactgattgaaaagcattaagaacaactaattgccaatttgtatttgggctgtttagttgatcgttgtagccttgtgtggcaccaggcaaagactaagccacaattctgttggttgaggaaatatttaactggaagatgcttttgaatgaatgatcagctacccaggtactatttgacatacagcagtcttggggcttccatgacttattctcctatcatctgtttgcatgataaaattacaggtttccatgtaatctttagcagatgtatttgctatgatcttggaagacagggcatagcttctctggaattaagggaatggcccaggaaaaagaagaggtgcccacagataaaatggtcagttatttttatatatgtgtgcattcttctgtggtgtgcagaacaccaaattgcttggacctgtttattcccacagactcacagtcaaactggtcctgaatattaaatctgatggtttcattctcctgataaaaatcctttgtcgataaaaaatcctttgtcaagtctcctgaatgctagctaggcatacgagatccagcattattgcccctgtctacctctgataccattccgtgctatccctcaccattcatcctgtgttctagcaggtgcatctgcacacgcttgtttgaattctatggaaccagagatgtttgagcatagagaatgaccagattttaggcagttaatactgtatatatacaatataatgcataacactgccagtgaagtttggagcagcacctgtaatcgtgcatactaatatctctacagtaaaacatatgaatattcacaccaaacaggttaagtcagctttaaatggcttgatccattcagatcagattttaccatcaaatgaattgtgaaaagacttttggtatttgaaatgctttgggttgaagaagtgtggtagacctgtacttgcttttcttgaaaagagcctgtgctctcttattcatctggcctttgggcatgttgttttccctgcctggaatggccacatctccctctgcctgttgagtagcatcattactagaatcatcattgcatatactgaggatttactatgttgttactcccagcaaattctatggtcgggggggcgggggggggtgttcttattgtattacatccccccagtgtttagatgaggaaactgaagcttggagaggtcacagagctaggaagaggtagagctgaggttgaaccaaaaagtatggagacaacaaaccttgggttcttagttactacactgtccgtgtgtgcgtcttccccaaaggtccagttcaggtgtcaccttcctaaggccctcttcccttcctccaccacgtttaatagattatgactcctctgggccttcacagctgtttatgcatagctgtggtgcactgcttctcattctctgtctttcccatgagcctaaactccttgagtagttggggaaaaatgtctacttcagtgttctatctctagggcatacagtaggtagtcaacacatagtttataattaagttagtttaaagtgatacggtaacagataacaatttgtatcatcattaaaataaatagtaaacaccaaatcacaagttcaaggatataaaatttggatttacaaaagaaaaaaatactcagaaaaaaaaaggctgctcatttttatgcatggtatgtaaagaagaggaatttggggacaacagttcaagaatgggcaaggaacacatttatacttaaaaattatgacagctaggatttattaaatacttcacatgtgacagtttctctgctaggcattctgtgtataaactttctaatcctcacaacaaatatgtaaggctaattgtcgaatccctgaatggacaaaaattatagctatataagaaagagaaagatatggtaaccatgtcttagatcagaataaaaagaacaaaaggtaatgatcctaatatattcagatttaacataaattaagcatcattagaggacagtcacataaaattgcacaatagaatatatttccacatctgagagatgatggaattgaggtcaaagagattacaggctagtatgtggtattttatacccattccttgaattatgttaacatggtaccagaagtatatcttgctgtcctcctcagaactgggtgcagttttgagctctgcttttgtaaaaagctgttagaacctgaaagaaccacataacacagctgtaatattcaagagaaagtgggtcccacgaacaaagattgagattgttcagagaaatggggtggttctgattgcttaatagaaacctcacaggttggctctattattttcttgtttatggaagtttttgtgaccgtaagagctaacttttccttggtgctttagagtttattaaacgtcttatggaatttgatgctcagaataactaagtgaatcagtcagagcagatgttttctttttttcaaatgagactcaaagaaattaagtgatttgttcagtgtcccacagctaataaatgatagggccaagactcagatatgtatctgagcagacccctgagccatgtccactgcaatcttgcaatccttggttcatcttcatttactcaaattgaaggatcctgcggctggtgaatgtctggttcattgcagaagagttcctggttccttgtctctaatttccattgtgactgtgaattctccattgagctgcaagccagtgactgtcaattaatgtgcacaaaatatacctgggtaactgttttaaaaatgcaattcctcaggcccctctcccacagggtctgattctctaagtcttgctggaagggatatatgagaatctgtaattttaacatgtgcccaggtgattctaatggaaaactttcaaaaaaactgctttaagctctttcagagtagcaattatatctttacttcattgtttccgtagtgcctagcagagcaccttgtacatagacagtactctaaatttacacttgatgaatataagagtgaagtaaataaatgtaaaattaatgtaaaatgaaggaaaacaagtttgagaatcagtcagttcctgccagatttggagcacactgaggaatccctttatctccatcctttcaaataaaatatctcttggtaggtctgggtaagacatactgagaagtcatgacttggacaaagtacctggtagaatctgccaacaattagagattgtggaattcttattttctcatggaaagcaggatggagtgaaacagtgagagatcctgtttgtagttctgtgcagacaaacccagaaaccagaacgcagacacaccaggacgcaacaggaaaccacaaaggcctgagatctttcaatgtaaataggaagtcagagtttacttccgaacccacagtgccaagctgaagtgcagtgtttaatccagctctctacccagcccttccttgagcctgggcacagatgaaagatgatgatgccacctgggtaaaagcattcaaaaatgtttgttctgatcaggtcttggagtgagcttcttttgtttgtgctagtgaataatttgggacacaggtgcactttgcatttgaaagcgttaattggtctccttggttttccctgccatgatatttgaagccacatcttcctccacaaagtaattttaatccatatacattcaaaaagcacttgtcatggacagccgtctttcatataccccatctgtggacccctgggtccaggtgcagagtagtggaacattggtgatgcttaatatgtactctgtgttcattgcattgacatctgtaatctcatttgattactactattacactgggaaataattaataggatacgatcatcaccattttgaaataaggaaaatgtagtctggtagaaaacacatggatgttaaagttaggcagatctgtgttcatgtccaaaagacttaagctttcttaccagactgctttattttatgtagccagttgtttagagcattcactctgtgccaggtactggagagaaaatggtgagcagtagacctagactgtacagtgtagtggaggagatgaatactcagcaaacaattacaaaaatgtataattacagaccttgataagtgctttgctttcataccctgctgggggaagtataaattgggcagtcactttggaaaacagtgaggcattgtctgatcaatttgactgtgcacatgccctgtactctaccaattccattcctaggtaggaagctggagaaacaattgtacttgtgtaccagtaagtgcccagagacaagtaagtacaagagtattcatagcattattttttataatagctacaaatttgaatcaactcaaatttcatcaataatagcatgaataactaagttgtattatattcatacagtggtagacatacttaaaatgtaggaactacagctacatatgacaacatagatggatcaaacaattttaagtggaagaaacaagacatgaaagagatacatacagaattatttcattcatagaaaattcaaaaagaagcaaaaaagacaatgtcttttaaaaaatgcctacaaaagcactaagcttagaaaagacaagcaagggaataattaccacaaatatcaggacactggtgaattagatggcttggaattgcaggttgttgaggttaaaagatgctttcaggaagagcttgagggaactagcatttgcttctgaaggatacatgagtacttaacagtttttttaatgttcacataagttttatacactcctctgtatgtatgatatgtaagtgctagaaagcagagaagctatcagaacatagagccaagtgccatataatttgggtggtctagaaggcaaggcagtgatgtttgagctgggagattttgattaggtaactaagcagagagcctgacggggagggagtagggttgtgcatggcagtggtcaagagaaaaaatttgttcagaaagagagtacagaagaataagcagaaggaaattggcagctttggtgtggggcaagagagaagaatgctacaagtaaaggctggagaagcaaaaaggggtagcatatgctgggcttgtaagccttctgagggattttagtcttttatgtaagagaaactgaaaggttttaagcacagtggataagataattgaattacaaaggatggaaataattccagtttggagaacaaattggcaagagacctgagtggtactaggatactaggaaaccagaagaagactgggagtctgtgtgagagatgatatcatactaacttgtctcagattatggtgggggagatgagatgtcgatatattggaaagatgtttagaagataaaatcagcagcacttccttggtgtgaaaactgttgaggctgcagggcaaacacaatagaggcttattaggtatctcacccaaactcctaagatgagctgctccccagtgagtagagatatctggagagagagcagtagtcgttcaggcattccttggacagactggattcactagagagaaacatttttggtttgcactgtcagctttgtttttaggttgttttaaatattttacccttgtctcttatgaaaggtcttctcaagaagtagccatgtggacacgatattgctttggtagtaattctgccaaaaatgcctgacttgaatctgatcatgaggaaatatcagaaacccaaattgagggagattctataaaataacttgcctctagtcttcaaaaatgccaaggtcataaaagaaaaactacaggaagatcaaaggagacgaaagagacatgatatctgaaggacatgtgtgatgctgaattgaattggagaaacttttttaaaagttttattgtaaaggacatttagtggataatagatgacattctaataagatcagtagattagataatagaattgtatctatgtatacttcctgataattgtattatggatatataagagaatatccttgttattataaaatacacactgaattattgaatattttggagtaaaaggacattatgtctgccactttcaaatggttcagaaaaactacatacatatacacatatgtgtgtgtgtatatatatgttcatatatatacacacatgtatgttcatatatatatgtttatgaacaatatgtgaacaatatgtttatgtaaaacattgggaaaatctaggtgaatattatacaataattctttgttctatttttacaactatttcataagtgttaaatcatttgtaataaaacattttaaaagtgttttttaatagaaggaagtagtcatgtgaaggccatgcttatatttggcataaccatgagttaatataccactcattgtgccccatataaaatcccacttgagaatttattttagaatttaccatttggaaaagtgttgttcaatctcaaatggtgtattttcatctttccagtaataaaagctatataatggattacatttttcttctggccctggaagccaaggaaactcagagttaaaaatttaacactcaagctaaactgttgagccttctactacatagcatatttccattcttctttttgctgtaattgtcttgcattactgtttctagtcactctgtactatattatctgtgtatgtatgtttgtgggagtggtagataaaatatctcaaactctttgtattagtttcctatggctgctattgtagcaagttgccatacacttggtggcttaaaacaacacacatatattttcttatggttctcgagactagaagttcaaaaccagtttcactcagccaagatcaagtgtcaacagggccgtactccctctggaggttccaggggaaaacctgttccttgcttcttccagcatctggtggctgctggcattccttggcttgtggccacatcattccagccttgccttctgtggtttcattgcctcctcctcatctgtggtcacatctgcctctccctgtctcttacaagaacagttatgattgcatttaggccaactcaaataatccaagattgtctcctcatgtcaggatccttaatcacatttgtgggtcctttttttttctttcttttttatttttttgccatatgagtaacattcataggttccagggatttgaacatggtgatcttttcaggagccattattcagcctaccataccctttatggaaagaagtgacatttaaatgtgttttttaaggtacataaaaataaagtattaatttatttggaaaatataaagtacttctgcactctgtgtatagtgaaggaacaaagataaaagaaatcaaatttctgtttagtgatttttcattgcttttatgaattacattgaattttctattatatttcctatttggttatttctggaatagagaaatatatttgactttttttagaaagtaaattatttgttaatatgaatgaataatacctgtgagatttccaatgaaaagaagcaaagttttatacatcaaatttgcttccaaatgctaatatactaaaatcagtgctagttatgtttaatataggttgctgagaaaaatagttatcttttatggtttttaaaaagtgtatgttaatttatttttatcgtttatttcttactgacaaatgcaaattgtatatatttatggggttcaatgtgaattttgatatactatatattgtaaaatgattaaatcaagcttattgacatattcattacctcacatacttttttgtggtgagaacatttaaaatctactctcttagtaattttcaaatatacaatacatttttattaactatagtcaccatgctgtgcaacagatcttcaaaacttattcctcctgtctaacccaagcttagtacaatttggccaacatctctgctttaccccttggcaaccccaccctaataaccaacattctactctctacttctatgagttcaactttattaagctttacatataagtgaaatcgtgcagtatttatccctctgtgtgtggtttattttacttagcataatgttctccaggatcgtctgtgtcactgcaaatgacagaatttccttcttttttaagactgaatagtattttgttttgaatctatggcacattttcttgatctgttgatggacatttaggttgatttcatatcttggcaattgtgaataatggtgcagtgaacatgagagtgcagacatctcttcaacatattgtttgcatttcgtttagatacacccagaagtagaattgcctgatcacatggtaatttgtcatttttttgaggaaactccatactgttttacaaaatgcctgtactagtttacattcccacagatttttaaaaagttaatcttctacccactaaccttgctaaactttcttatttttttaaaatgtgcatgtattatatatgctctgcatgcattataaatgttacagtaatttttaggtacaacactaaatattctcatatggtttggatggtcagtgaaggcttctgtaaggaagtgatatctgtgatattttggttaggaaaaaagtggtccaaacatagaggacagtatgagctatatatacaagatcatatcatctgcaaattttgcttctctcttcccttctttatatcttcttttgctgttaatttttgtctaattgtgtttgctagggcctctggtattatgctgaacagttgtggtgataaaaagcattctcacatgcacacatatgtttattgcagcactgtttacaatagcaaagatttggaaccaacccaaatgcccctcaatgatagactggataaggaaaatgtggcacatatttaccatggaatactatgcagccataaaaaagaatgagttcatgtcctttgcagggacatggatgaatctgggagccatcattctcagcaaactaacacaggaacagaaaaacaaacactgcatgttctcactcataagcaggagttgaacagtgagaacacatggacacagggaggggaacatcacacactgaggccagtcggggggtagggggaaaggggaagggagagcattaggacaaatgcctaatgcatgcagggcttaaagcctagatgacgggttgataggtgcagcaaaccaccatggcacatgtatacttatgtaacaaacctgcacgttctgcacacgtatcccagaacttaaagtaaaataataaataagcattctcatcttatttctaatcttagagggaatgtatataaaatttttccagtgagagtgatatttgctagagattacagacagacagacagacagacagacacacacacacacacacacacacacacacacacacatttccttatgaaattgagtaaatgatcttccaaagcattcagggcaaatagcagcccatgttttaataaccctaagaattattttatatgatagtcccattccatggccatggagctctgtcactatactgtgaacttctctatggcaggaactattcattcaccattgtatccttactctgaacttctctagggcaggaaactgttcacttgccattggatactcagtatctagcacaatgcctgtaagttaggcattcactatccattcaatgaatgaatggatggatgaacgatagttaatatctgtttcattctcaaagctagcaaattctttttaagcatgagccaaaaatatcactactttccattttctttattcaatgagttgagctcattttgccgccatccttacctcctcccagcacctggtacagtcagtagtcatttgacatatgaaggaataaatgaatgagtcaatcacagagcattctgctgccagttgatagactttgcccctaaagattctgaactttatttgaactgaagccaggtggttaaagatgatttaatcaggacaaaaataaaattctactctctttaatggaataattgcttattgcattttcttcttaaagttggccattcatctccttaaagttggccactgtctttcaatttatatatgttgtccatgaattattgaaagtgattattctgaattaagccaaaattattcacaaagaattgtcttggtgtgtgactagagggttcagaattccagtattacttggagagaggggttgggtatagtggtaaacttaaagtttacctgcaaaaaaacagtgttgaatgcctgagtatggcaaatccaaaaagtaagtatttggatttattggtgaataagggagagaggttggttatcaaaaaaagagcagttaagtaggaatatgttagtagttttaaatactttatgatggctctaatcatatatgtacttcctatttcaaaaggtatttcatttcataagttagagtaacacccaatattagaatttcagtgtccagaaattgattaccttctcctgacttggaactctctgctcaaaagcctttgatgactcttcgttgcctggagagtaaaaatttatttagccctagccagcgctgtccacctgcactcctaccatacacactctctgtttcagccacatgtaacagaatgttaccatagggctcttcctatcttggaggtttcgaacaggccccagagcccagaccacctatgcagagcttgctaaaagattgtgaaacttgtgctaaacgtcaccctgaggatataaaagaggtggaagaagtcagaggtcaagactaaggaaagaggctgaggttgatgattgtatctgagagagtagagcaaaaagtgaagacaaggaaaaggtgtgtgggtccagcacaagggagccagctggggatatcttaaaaggaatcccatccataaggttcaactagaggagcagaatgatcccagagcaggacttgatcacctgaaggccaggactgaaagggagttgtgggcagaccactggacggagagatagccagctttggacaggcaccacaccctgaggacataatgaagccagataacaacgtatatgcatcaagtgagaccttccccaggcaccttgacccctgtatggaggaaccccaaaacacccagctgtccagcaggaaaaagtagaaggaggagagagagaagccagcaagtccccttcttgaagtgtgtatacgctaagcctgaaatatactgtagctgcagaagggagaattttcaattagccaaaatgggagttttaattattataatagagtgtacatatttactgctagaagctggcctgaggacttttataattgaagagtgtaggaatacagtggatccccctgaaatttcatcccaggaatgaggaagaacagttcgtggaacaaatttaccaaggagaagagaatagagctgttttttcctgcacacccataatggtactacagatccttcaataaaccagaacacacacaaggctggggttgtcctctcgtccctctcctacatcagcaaatctgtctctacgtaatcatgtaagactacagcttgctttaatagctcccatcttaagaatgggagggggagagcgaggtagaagaaaaaccttgaccttatatttcgccctcctgttcccccatttattgtctttgccacacagcttctcaagtgctgtataatcccattcctcccctcccactctctcttgagcccaatcagacatttgtacaaacttctccatgaaaataacccttgaccatttgtttcgggctcctgtgaccagggtctgtgttcctaaatccagtagtcctcattcagatcgttctgttggcagcattgggcacagctgcgccctcccttctcaaaacccctcacttgcatgtagttgactctttggtcccattgtctaattgctctccatcaccagtttctaaattttggaaggcgttaagcctctgcccaagacctcttccctgcccatttccccttgcttcttcagtgacctcattaagactcaaagctttaagacaccatctgtagagtatgacctccaaacatatatctccagcctgaccctgatatcctaatatatttaatcacctactcagcatttcttcttggctttctaatagatacctaaaatttagcatgtcaaaagcctaattcctctcagcccccaggaaatctcctctcactgtctttcctagaacatgaaagaacaattctattcatacacttgcctatgtcaaaacaccttgaaaacatccttcatccctctctttttctcatattgtgctccagtaaatgctgtcagttctactgatggaatccaccaatgtggaccacctagttcaagcagttgtgctccctctcttggtttattgacacagtctcctgactgtctccctgtttttaccactgggccctggattctgttctcacagcagccagggtggcctcttgaaaacttgcctcagattatgtcattcctctgctcaaaacctttcaataattttgcatttcactgagaattaaagccaatgtccttaaaaataaaagatctgttcctcttacttttcagctctcatcttctgtcccctttctcactgttcacaccactgcagctgccctgattctttgctgttcatgtaagatagcaagcacacctctgccacagggcctttgtacttgctcttatctctccacctgcatcactcttaactgcatgcttcactcactcactcccttccagtctctgctgtaatgtaacctcatcattaaggtctatccagaccaccctatattaaaataacaacacttgccttcactcactgcttaacctctctatccttctttatttttctacacacagttatcgtcctacgctccactggactgtaagttccatgaagacagaactttgttttttcaccactgaatccccagccccttcaaagtgccttgcatgtaatagactctcacaaatagttctcaaatggagggtgcttcctaacttgctttagcctttccacatgctgttctttctggcaagagttgcttccctttaccccccgccttgttacaccccagccccaagtgagcctgttagaatcctgtgcatcctctcagactccagtttcatacaacctcctctgtgacaccgcgtgagtcagatttaattcctctttccccagaactcaaagttttcagttttattttgctttaatcaagtttgtacccttaaccactacattgtgtgtctttcagactcttgttctttcttgattttaaggctttagagatgacaaattcagcaaccgcaggtccttctcatgttgtagaattgtaaagtagctgttttttaactgcatgcaactgtatgaatcctaaacctagaattttcaatccctctattctaccgcatgtattttcatttctccttctttttctactacttcctcttcatcacaaaaaaagtcccaagcacatattatatgttattcattttcttcaaacatctttcacttaatagtttagagaaaagcccatctattccattgagtgacctttcctatgactatagaaagtggtcagtttttctgtcccttggcctgtttagcagttgaaatgcacctgacagtttgtattacaaagctaaatggtggtggccagtaaggagtttgataaacttttcatgtaatttatacataggggaaatgacactggctgttgagcacatgaagtcattttctttcttccctgaaatgctttgggggagaagaccaatcagtcatcttagtgctgcacctccatagtgagatctgcattaggtttttgaccaagaagacagtaatattttatgacaaaacttggaaaagttaaaaattcacagatgaacaaatgctttttctcattatttatctttttattctttcctatttttattccctgagaccatttgcatgaggggaaatttaatcaggatccctagttgagaacatttctattggagaaaatggaacctggatatcaaattatctcacaacttcttctgagtgacatacactgaattttatcttaaatagcttgtttagaagctattggtcaccagcttaaatagcaccttttcattataacattgcttctgttgttgcattcataacattttatttgctaaaaatgtattaactgtgtctctcccatcagttcttgagctttggagggctgtggctgtggcttattcatctctccatacccaaagactagcatataatagacatacagtaaaaatggaaagactatattgagctgcagtctaccctgtccaattaaaagtcagtggacatttgttgaataactgctatgtgccaggtattttgaaatatttggtgttatttaatctttatagtgaccctaaaatgcattgttatcccttagttatagatgagagaaagtacataagtggtttacccagctagtaagtagcagacctgtctttgaatgtaacccatgtaaagcaaaattttctgtcctttctcctttattagagcttaagtgatctttcagggaccgatatgtttagctatcaactctgtaataacatgaaaaatatttatttagctgtgatcatctatttgataaattgtcagagtgataaacccaaaaggagctttaaagatcattcagcctgtaatcccaaggtggaaagatcacttgaggccaggagtttgagaccagcctgggcaacatagtgagacccttctctcttaaaaagaaaaaaaagctggatgtggtggtggtgggtacctgtagtcccagctacttgggaggctaaggcaggaggatcacttgaacccaggaatttgaggctgcagtgagccatgatcatgcccactgcattccagcctgagaacagagcaagaacttgtctcaaaaaaacccccagaaatcatccaattcagtattctaatttcagatgcaaaaattgagtcccagaagggaaaaggtcttggccattatttcttctgtcagttggaatcatgttattcttctccttttgcactgtccttacagtaattacttttaaatccttagcaagtctgattatcccctgcatggtatggcctgtgatgacctctccagcctcacgttgcactactacccctcacagtttctgtccttcatctgtggcatagaacacactctattctctgcttcctgtccctctgcctatagcacccttccctctactccttctcctaagtcctacttacccttcacatttagctcaggcatctaatatcctctcgctggaagctttcagactagattaggtggtgtatctatgtgcatccatggtacatacctgtcatggtgcgtatccttctgtgtttgttgttagttaactggcttatgtcttccttgctgtgaattccttgaggacagatattgcggagcattcatttctatatcaccacggcctcataaagctcctcacacaaagtcagctttcaggaaattttgaaagaaataatcactcacttggattcaggtctgaagtgaggcaaacattagagatgtgatggtgttgaatactcatcgtttttgatattttgaaggctctcccatgcttgaggatccaaaggagtttaccattttgtaatgccacagatgtgtactggtgtctgtaatgctcaggtcccatccttgagcttcaccaggaacatcagtaggaagatctggcacaggctatgtggagagcctcctcaccccatgctgatgatctcatagtatctggtcactgccactaaggaaaaataaatgcctgcaggtccttttataccatgatgtaactaactataggaagtgtccctatgcaacatctttcatcttacctgaatcaaagcttcaatgaatgaagttctcttcggcccatcatcctgcaagaaactggtaggatgatggcattgggaagctataagggtgattctgacttctctgaaatgacatacattccttgtcaatattatgtcagcggaaaacttgctagccttagaaataaaaataaaggtcttatttttacattgacactttcaatctaggtaaacttgaataattcatttgatatttcagaggcttcatttcttcatctaagaacatgaggatcttttctatttatggaggtatcttgaggattggttgaagtagtgagcatgaaaggtctctagaaaaccttggttgtttagacatgttttagggacattgaaatggactgcgcatggaggaagcttcatggggggcacacctgaggggcatttcctcaatgggagagcacctttgcccttcacaacattcacacacccctcctgggtattggtgccaggctagtgccctgatctgagtccacctctgaacagtcaccctcaccaagataccccgagccaggagagccagtggagcacatctaagccaaagatgtcaaagagagtgaggagtgagaggtccaaattcaactggagaccctcaagatgagacctgttttgaatgagagagagatgaccgtgcagggtggaagcaggtctgatgcagctgacagctaaccactgctgctcggaagtgtcgacggctcaccacttatgtgttggcttttgttcctggactactcaggtggtttaaaagaccaggtgaaattgaggcaataatgaatagcttaccaaccaaaaaaagtccaggaccggatggattcacagccgaattctaccagaggtacaaggaggaattggtaccattccttctgaaactattccagccaatagaaaaagagggaatcctccctaactcattttatgaggccagcaacatcctgataccaaagcctggcagagacacaacaacaaaaaaaaagagaattttagaccaatatccctgatgaacatcgatgcaaaaatcctcaataaaatactggcaaaccgaattcagcagcacatcaaaaagcttatccaccatgatcaagtgggcttcatccctgggatgcaaggcttgttcagcatacacaaatcaataaacataatccagcatataaacagaacaaacaacaaaaaccatatgattatctcaatagatgcagaaaaggcctttgacaaaattcaacaacgcttcatgctaaaaactctcaataaattaggtattgatgggacgtatctcaaaataataagacctatctatgacaaacccacagccaatatcatactgaatgggcaaaaactggaagcattccctttgaaaactggcacaagacaaggatgccctctctcaccactgctattcaacgtagtgttggaagttctggccagggcaatcaggcaggagaaggaaataaagggtattcaattaggaaaagaggaagtcaaattgtccctgtttgcagatgacatgaatgtatatctagaaaaccccatcatctcagcccaaaatctccttaagctgataggcaacttcagcaaagtttcaggatacaaaatcaatgtgcaaaaatcacaagcattcttatacaccagtacagacaaagagagagccaaatcttgagtgaactcccattcacaattgcttcaaagagaataaaatagctaggaatccaacttacaagggacgtgaaggacctcatcaaggagaactacaaaccactgctcaatgaaataaaagaggataccaataaatggaagaacattccatgctcatgggtaggaagaatcaatatcatgaaaatggccatactgcccaaggtaatttatagattcaatgccatccccatcaagctaccaatgactttcttcacagaattggaaaaaactactttaaagctcatatggaatcaaaaaagagcccacattgccaagtcaatcctaagccaaaagaacaaagctagaggcatcacgctacctgacttcaaactatactaccaggctacaggaaccaaaatagcatggtactggtaccaaaacagagatgcagaccaatggaacagaacagagccctcagaaataataccacacatctacaaccatctgatctttgacaaacctgacagaaacaagaaatggggaaaggattccctgtttaataaatggtgctgggaaaactggctagccatatggagaaagctgaaactggatcccttccttacaccctatacaaaaattaattcaaaatggattaaagacttaaatgttagacctgaaactataaaaatcctagaagaaaacctaggcatcaccattcaggacataggcatgggcaaggacttcatgtctaaaacaccaaaagcaatggcaacaaaagccaaaattgacaaatgggatctcattaaactaaagagcttctgcacagcaaaagaaactaccatcagggtgaacaggcaacctacagaatgggagaaaatattcacaacctactcatctgacaaagggctaatatccagaatctacaaagaactcaaacaaatttgcaagaaaaaaaccccatcaacaattgggtgaaggatatgaacagacacttctcaaaagaagacatttatgcagccaaaaggcacatgaaaaaatgctcatcatcactggccatcagaaaaatgcaaatcaaaaccacaatgagataccatctcacaccagttagaatgccaatcattaaacaggaaacaacagatgctggagaggatgtggagaaataggaacacttttacactgttgttgggactgtaaactagttgaaccattgtggaagtcagtgtggcgattcctcagggatctagaactagaaataccatttgacccagccatcccatcactgggtatatacgcaaaggattataaatcatgctactataaagacacatgcacacatatgtttattgtggcactattcacaatagcaaagacttggaaccaagccagatatccaacaatgatagactggattaagaaaatgtggcaaatatacaccatggaatactatgcagccataaaaaatgagttcatgtcctttgtagggacatggatgaagctggaaaccatcattcttagtaagctatcgcaaggacaaaaaaccaaacaccacatgttctcactcataggtgggaattgaacaatgagaacacatggacacaggaaggggaacatcacacaccggggcctgtggtggggtcgggggagtggggagggatagcattaggagatatacctaatgttaaatgacgagttaatggatgcagcacaccaacatggcacatgtatacatatgtaacaaacctgcacattgtgcacatgtaccctaaaacttaaagtataataataaaaaataaaagaccacgtgaaatgagcaggcttgggcaattcaaagcctggaaaaaaagtggtagagagggggatttggggaagagtagatagacagaatgaggtgacacattgaaggacttcttagagaaatgcatttgaggaagaagcagccaagatggccgaataggaacagctctggtctacagctcccagcgtgagtgacgcagaagacgggtgatttctgcatttccatctgaggtaccgggttcatctcactagggagtgccagacagtgggcgcaggacagtgggtgcagcgcaccgtgcacgagctgaagcagggcaaggcattgcctcactcaggaagcacaaggggtcagggagttccctttcctagtcaaagaaaggggtgacagatggcacctggaaaatcgggtcactcccgccctaatactgtgcttttccaatgggcttaaaaaatggcacaccaggagattatatcccgcacctggcttggagggtcctgcacccacggagtctcactgattgctagcacagcagtctgagatcaaactgcaaggcggcagcaaggctgggggaggggcgcccgccattgcccaggcttgcttaggtaagcaaagcagcctggaagctcgaactgggtggagcccaccacagctcaaggaggcctgcctgcctctgtaggctccacctctgggggcagggaacagacaaacaaaaagacagcagtaacccctgccgacttaaatgtccctgtctgacagctttgaagagagcagtggttctcccagcacgcaactggagatctgagaacgggcagactgcctcctcaagtgggtccctgacccctgacccccaagcagcctaactgggaggcaccccccagtaggggcagactgacacctcacacggccgggtactcctctgagacaaaacttccagaggaacgatcagacagctgcattcgcggttcacgataatcccctgttctgcagccactgttgctgttacccaggcaaacagggtctggagtggacctctagcaaactccaacagacctgcagctgagggtcctgtctgttagaaggaaaactaacaaacagaaaggacatccacaccaaaaacccatctgtacgtcgccatcatcaaagaccaaaagtagataaaaccacaaagatggggaaaaaacagagcagaaaaactggaaactctaaaaagcagagcacctctcctcctccaaaggatcgcagttcctcaccagcaatggaacaaagctggacagagattgactttgacgagttgagagaaggcttcagaccatcaaactattccaagctacagaaggaaattcaaaccaaaggcaaagaagttgaaaactttgaaaaaaattcagatgaatgtataactagaataaccaatacaaagaagtgcttaaaggagctgatggagctgaaagccaaggctcgagaactacgtgaagaatgcagaagcctcaggagccgatgtgatcaactggaagaaagggtatcagggatggaagatgaagcgaatgaaatgaagcgagaagggaagtttggagaaaaaagaataaaaagaaacgaacaaagcctccaagaaatatgggactatgtgaaaagaccaaatctacgtctgattggtgtacctgaaagtgacggagagaatggaaccaagttgaaaaacactctgcaggatattatccaggagaacttccccaatctagcaaggcaggccaacgttcagattcaggaaatacagagaacgccacaaagatactcctcgagaagagcaactccaagacacataattgtcagattcaccaaagtcgaaggaaaaaatattaagggcagccagagagaaagggcgggttacccacaaagggaagcccatcagactaacagcagatctcttggcagaaaccctacaagccagaagagagtgggggccaatatttaacattcttaaagaaaagaattttcaatccagaatttcatatccagccaaactaagcttcaaaagtgaaggagaaataaaatactttacagacaagccaatgctgagagattttgtcaccaccaggcctgccctaaaagagctcctgaaggaagcactaaacatggaaaggaacaaccggtaccagccactggaaaatcatgccaaactgtaaagaccatcgaggctaggaggaaactgcatcaactaacgagcaatataaccagctaacatcaaaatgacaggatcaaattcacacataacaatattaactttaaatgtaaatggactaaatgctccaattaaaagacacagtctggtaaattggataaagagtcaagacccatcagtgtgctgtattcaggaaacccagctcacatgcagagacacacataggctcaaaataaaaggatggaggaagatctcccatgcaaatggaaaacaaaaaaaggcaggagttgcaatcctagtctctgataaaacagactttaaaccaacaaagatcaaaagagacaaagaaggccattaaataatggtaaagggatcaattcaacaagagctaaccatcctaaatatatatgcacccaatacaggagcacgcagtttcataatgcaagtcctgagtgacctacaaagagacttagactcccacacaataataatgggagactttaacaccccactgtcaacattagacagatcaacgagacagaaagttaacaaggatacccaggaattgaactcaactctgcaccaagcggacctaatagacatctacagaactctccaccccaaatcaacagaatatacattttttccagcaccacaccacacctattccaaaattgaccacatagttggaagtaaagctctcctgagcaaatgtaaaagaacagaaattataacaaactgtctctcagaccacagtgcaatcaaagtagaactcaggattcagaaactcactcaaaaccgctcaactacatggaaactgaacaacctgctcctgaatgactactgggtacataatgaaatgaaggcagtaataaaggtgttcattgaaaccaacgagaacaaagacacaacataccagaatctctgggacatattcaaagcagtgtgtagagggaaatttatagcactaaatgcccacaagagaaagcaggaaagatccaaaattgacactctaacatcacaattaaaagaactagagaagcaagagcaaacacattcaaaagctagcagaaggcaagaaataactaaaatcacagcagaactgaaggaaatagagacataaaaaacccttcaaaaaattaatgaatctaggagctggttttttgaaaggatcaacaaaattgatagatcgctagcaagactaataaagaagaaaagagagaagaatcaaatagacgcaataaaaaatgataaagggaatatcaccactgaccccacagaaatacaaaccaccatcagagaatactacaaacacctctactcaaataaactagaaaatctagaagaaatggataaattcctcgacacatacaccctcccaagcctaaaccaagaagaagttgaatctctgaatagaacaataacaggatctgaaattgtggcaataattaatagcttaccaaccaaaaagagtccaggaccagatggatttacagctgaattctaccagaggtacaaggaggaagtggtaccattccttctgaaactattccaatcaatagaaaaagaggttatcctccctaactcattttatgaggccagaatcatcctgataccaaagcctggcagagacacaaccaaaaaagagaattttagaccaatatccttgatgaacattgatgcaaaaatcctcaataaaatactggcaaaccgaatccagcagcacatcaaaaagcttatccaccatgatcaagtgggcttcatccctgggatgtaaggctggttcaatataggcaaatcaataaatgtaatccagcatataaacagaaccaaaggaaaaaaccacatgattatctcaatagatgcagaaaaggcctttgacaaaattcaacaacgccttatgctaaaaactctcaataaattaggtattgatgggacgtatctcaaaataataagagctatctatgacaaacccacagccaatatcatactgaatgggcaaaaactggaagcattccctttgaaaactggcacaagacagggatgccctgtctcaccactcctattcaacatagtgttggaaattctggccagggcaattaggcaggagaaggaaagaaagggtattcaattaggaaaagaggaagtcaaattgtccctgtttgcagatgacgtgattgtatatctagaaaaccccatcgtctcagcccaaaatctcctcaagctgataagcaacttcagcaaagtctcaggatacaaaatcaatgtgcaaaaatcacaagcattcttatacaccaataacagacaaagagagagccaaataatgagtgagctcccatttacaattgcttcaaaaagaataaaatggctaggaatccaacttacaagggatgtgaaggacctcatcaaggagaactacaaaccactgctcaatgaaataaaagaggatataaacaaatggaagaacattccatgctcatgggtaggaagaatcagtatcgtgaaaatggccatactgcccaaggtaatttatagattcagtgccatccccatcaagctaccaatgactttcttcacagaattggaaaaaactactttaaacttcatatggaaccaaaaaagagcccgcatcgccaagtcaatcctaagccaaaagaacaaactggaggcatcacgctacctgacttcaaactatactacaaggctacagtaaccaaaagagcatggtactggtaacaaaacagagatatagaccaatgtaacaggacagagccctcagaaataacaccgcatatctataactacctgatctttgacatacctgagaaaaacaagcaatggggaaaggattccctatttaataaatggtgctgggaaaactggctagccatatgtagaaagctgaaactggattccttccttacaccttatacaaaagttaattcaagatggattaaagacttaaacgttcgacctaaaaccataaaaaccctagaagaaaaactaggcattaccattcaggacataggcatgggcaaggacttcatgtctaaaacaccaaaagcaatggcaacaaaagccaaaattgacaaatgggatctcattaaactaaagagcttctgcacagcaaaagaaactaccatcagactgaacaggcaacctacaaaatgggtgaaaattttcgcaacctactcatctgacaaagggctaatattcagaatctacaatgaactcaaacaaatttacaagaaaaagcaaccccatcaaaaagtgggcaaaggacatgaacagacacttctcaaaagaagacatttatgcagcaaaaaaacacatgaaaaaatgctcaccatcactggccatcagagaaatgcaaatcaaaaccacaatgagataccatctcacaccagttagaatggcagtcattaaaaagtcaggaaacaacaggtgctggagaggatgtggagaaataggaacacttttacactgttggtgggactgtaaactagttcaaccattgtggaagtcagtgtggcaattcctcagggatctagaactagaaataccatttgacccagccatcccattactgggtatatacccaaaggactataaatcatgctggtataaagacacatgcacacatatgtttattgctgcactattcacaatagcaaagacttggaaccaacccaaatgtccaacaatgatagactggattaagaaaatgtggcacatatacaccatggaatactatacagccatgaaaattgatgagttcatgtcctttgtggggacatggatgaaattggaaatcattattctcagtaaactatagcaagaacaaaagaccaaacaccgcatattctcactcataggtgggaattgaacaatgagaatacatggacacaggaaggggaacatcacactctggggactgttgtggggtggggggacgggggagggatagcattatgagatatacctaatgctaaatgacgagttaatgggtgtagcacaccagcatggcacatgtatacatatataactaaccggcacattgtgcacatgtaccctagaacttcaactatagtaataataaaataagaaaaagtaaaaataaaaaaataaaagagaaatgcatttgaggcaaagcctcttttcctctgtgtagaactgatgatggggtaaaatagaagaaaccacacatatacaccctgatgctgatctagagcccagtagctccagagagctagggaaggccccactctgtgtgggacatttatgtggcctgtgaccacaagaaccgtcagcagcagaacaggtgatgagcatttgttgagtgaatcaaaacagaaatgaaccactgtgcaggttcagctgggttcccctgaatgcatccttgagagggtcctcagtgtgtttgtggacatctagttacaaggcaatcaacatataaatggggatcatcttcccatcgccttcaagaaaaacagaattctatttctgcatgtcatgaagggttctttaggatctgacacatacctgcccttccactcagaggtctgacattttattttcacatctgctccgtggctgcctgtctttgggcaagttacatgaccctgctaatcctcagttccctcatctttaaaatggggataaagatacctatctcaccggcttgtgataattataaaatgagaaagtgcaaataaatccactgtcttttcatcacacatatgccaatccagcatttgtgatttttaaaaattcttactgtatagtttacctttcagccaaaccatgccttcttcaagctgatattatactaagaacttttatctttattgaggtgcttatcagaatatcttgccattcttgcattaactgttagatatcccaactgcatgggaaacaaggacaagcacagtatctttttcatctctctttttcacaggacctgacacatagaaggtgctcagctgaatgtttgccgaagggtcatgtgaagtgtctctgttctggagaatcttgattcccaagagccccagataattcctggcccctactctcctatcccatattaggcagctactctgtgtcagaaactaagccaggggctctgcacaaaaggctgtagttcatagctctgcaaccctggggggcagctattatataaacttcttacaacaattaacacaaatccctcaagtgtaaacatctgatgtctctttaccttcaacccactagggacacaaattgagaacccagcaaccctcatctggcatggaaaacttaagacctggatttcttccacctgcacctgctgcgtttgtagccatcccctcccctcttccagcacctttgttgtttgtatcttaccaggattaaccatactagtctggactctgaactcagaaacatgtagattaaacatttcctagcttaaaaaaatagagtgcagaaagttaaatagttagctctcacatgttgattatttactatgtgaaggcagtatgtagggtttgtctaacattgcctccaattttcccaaatatccggtaaggtgaatattcttgtctgtcttttacacgggaagaagccaagattcaagagggcctcataacttgctgcatggatctgtgattcctgacctgggtacaccccaacactgcttcttcctggcaccaggcacccaaggaatcagttccactagcccccacgcctcagcaaccagcactaggcatggaggggtgcttcctcccaccaaggctgagtgctcagtcacaccctatgagagcaagccaatgaaatggaaaaatagctcttactcctgactctgacatctgccctgcaggtgagagccaaattctcaaattgccaggccaatggcaaataagcccacactatgcacagagggtatcaacacaaagagggttctgtgggaattcacacatcctggaagccaggctgaccctggtagacagtttcattttatcttgtctcagccacatgatgagtggagagagagaaggaaagtgcacagatctccagaaatggggtttgggttcactcttgagaatacccctgggcagtactctgacccttgggcccctctctgtaaacacacaagaacagctaaaatgtctggaaaggggaagggctggttccactgatgcccctgcattcattgagtttcctgcttcccaagtagctgagaggcagctggatataaaaggaacaggctttggagtcagacccagatcaaatccccattctgctacttggtacctgtaggacaatgagcaaggctttgaccttctgtgagccatggtttatctgtaaactaaaggaaatggtagattatcatgaaaattatagataagaatatgaaacagcacatagtagctgcttggcaaatgttagttgccttccctcccttttcccccactgcattcatttgtaatgcctttttttaaaaaaaaatgacagtaagagcaattataattggcacaggttgctttatgagctaaatatgttacagatcaataatacacaatctctggcctggcgcggtggctcatgcctgtaatcccagcactttaggagaccaaggtgggcagatcacaaggtcaggagttcgagaccagcctagccaatatggcgaaaccccatctctactgaaaatacaaaaaattagccgggcttggtggtgagcaactgcagtcccagctactcgagagactgaggcagaagaatcctttgaacccaggaggcagaagttgcagtgagccgagatcgcgccattgcactccagcctgggtgacagagtgagactccatctcaaaaaaataataataaaaaataaataaaaaccacaatctctatttaagccactctcacaggactgactgtaccctatatcatgtcatatatttgacagacagttgcttttcttccttttattcttctaaagaagtccagatgagccccagatacaggttcataccctagatagcctattccaagggttaaaatcaggcctgcttcacatcgaaggcattttgttatgatctgttcataacaaaagctgcctcctggctgttgcctgcagctgaatactgttactctgaagccatcatttcatttgtttctgattgttctgcagtgtttacataccttacatattagcgtgatcttttatagagtacaggcagaggttaagccctcccggatccactttccctctgagggctctttcttcttttttactgtcccttgcctctgtgttacaaaccatttctcttttatagaaattcatttaaatagaaaaacaatttttaagtgttttcttttttttttaacatgaggctcacttaacatttttagaaaatgttgaatatggagaagagggaaaagataccaccaaaatgtgtgattttttttttcttttttcctgacataggaaaatcccattacctctcttgaatttaccaagggacatattccatttagggcatagaaggacctgggctgcctccagacctaatgtggaagaaggtgctgtctgcctgctatttccttgcttctccttatttcaatcttttttttttctccaaaaaaaaaaaaaagtgacttaggaaggatatggacttgtgagtcagatttgggtctaagtcttggttctgccctatgtgtaatcccaggaaggaacttgagttgattttctgaagctcagtttccttttccattaaaactgggagtgactcaggcttgcctagtatcttagctggaagaatgtgtgtgaaactggcccacctttcacagataggtcaccctgctgattgcagtggcttccaggcacccaggcctgggaaagattcacaggcctagtccagacctggcaggaaagaggctgtgagcagttctgcctgccgcagatgtgctggcacatgtaccgccgtgtgctgccccaggtaacatatcaggcagctagggaatgtaggctttcagaccctctctcttcagttctcttctgctgacttcctcccatccagccatcatactttcttaatcctctcatcaatcccctttgttatagagaagatggaagggttaaattccttcaccctcatcacttccactgatatttgataaacacctctcagttcataatacttttgcactcaagcaggggagctacccaggtgtctatggaaagttttgaattctttttgcctattcagtttagtcttctcattttctatctggccagaaatggagaaagtgttttgaaggtcaggattcttcaggtctagacttgtagggatgtatcctgaattcctctgagctaagcctgagaagcacaagtgggttctattgggaaacacttccaaaaggcaatgattgatgcttatgcacagaaattctgacttttagtaaaagatgcttggatataaatcaagcaggactctccttgcctttatacaatatgcggtaaacagggtaaatcctcaattttacttatgcccactgacagatcttacaagtagaaattaacccatctgagtgatcgtgttgattctttctccctcttctctagagccattataacctctgtaccctacttcagaattctaatcaagatagtgtcaagtcttttaaaaaaaagttaaacccccacatgagctccaatccataaataagaaactcaccctggcttgtatggaggtgatgatattaacacaggctacatttctctgggtcactgaatgtacccggcactgtaccaaggccagtaatagactgtgccacatttaatctttacagatctgtaagagaggtcttatttgtcccatttttcagatgaacaccccaaagaccaaggtcacacagcagagactctcggctggagactgccctcaggcatccttttaacggaactctaaagtctgcaggagggagccatttttcctaccagccagtttagaatcaaaaaagagcattggttttgccgtattagagaactaattcataattagtactatgctcactcctggaggatttgacagaaatagaagatatggttctgactcaggatccacctcactacgtgatgtcagagcaacagagctaagactgcaactgatgagtattgtgcagatggagcacgctacctcctcgttagctctctcccctgcacccactctgccccacccactcctcctcccttgcgtgatccatagaatagaccaatatgtgtttacccaccacagattgtttggattgtgaaaaatgcatgatataattttatatctttgaaggcacacagctctcagagctttcaaagctgaaaaccagtctgggctcactggagccagttaggcatttgtatatagaaggccaagtgtggcttcttgtctataggagagagaaaatgtggaggaacttttggaaggcttcagagtttttttggctattctctctctcttgcaaagcaatctgggtgcattaactataaatgaatgagaaacatatggattaaattttatctgtgatcacatatgagtttcaagaatgataaagaataaggaattcagtgtttaaggagtccagaatactttgcaagtaattcaggatattgcaggcaacatttggctgcctccctctatccaaatttgaggactgtttggtagggtgacagacctgctcagtgccctccccacccactcagattgctaaacctcaggagatacctgtggataggttttgtgtgtatcttgttttgctgagactgaaataaagagattgggtttctaggaaaggcaaactctatgagaacactcttaaccactttgaaacccccaaatagaagaggaaaatttggtaagcccgatctttattaaccatgtcttgcttacagataatattagatgtgttttatatcctattattgcccttaatgttagtgtcattgtcctgttaatgataatggtagccatgtcctgcacttgtgtagtgatctaatttacaaacaggtacacattacctgttaatacacattacagatgtatttgtagagatgtacacttacaacatatgcagagtatgttatgacaagctacaatacaggaattacagagttaagtgaagatgcaggcaggagtacctaacccagcattgtggtagaagtcagggtttatggaaggcttttcagaggagataacattgagttcagtcctacacatgttcgtttgtttgtttgtttgtttgtttttgagacggagtctcaccctgtcgcccaggatagagtgcagtggcacgatcttggcttactgtaacctccacctcctgggttcaagtgattctcctgcttcagcctcccaagtagttggtactacaggcacgtgccaccacacctagctaatttttgtatttttagtagagccagggtttcaccatgtcagccaggctggtctcagaactcctgacctcccagtgatctgctggccttagcctcccaaagtgctgggttatgcatgttcttaaaagaatatgaataagtaagtggctgggtgcagtggctcatgcctgtaatcccagcactttgggaggccgagacgggcggatcacttgaggtcaggagttcaagaccacctggccaacactggtgaaacccatctctactaaaaatataaacattagctgggcgtggtggcatgtgcctgtaatcccagctacttgggaggctgaggcaggagaatcacttgaacccaggaggcagaggttgcagtgagccgagattttgccacttcacttcagctgggggacagagcaagactcaaaaaaaaaaaaaaaaaaaaaggaatatgtataagttagctaggggaaagcgagagggagtgccctctaatcagtgagacaagaatttatgaacactaagagttgagaaagaaaatggcacaaggggaatttcaggttcacttaagtctgaggcctagcttatgatgggcttggtgcaataaaaatgatgggggcagaggattgggaaatgataacataggggatttcaggagacaaaaaggtaaaagctacatcagacagtcccatatgtcgtggcaagctgctcaaggactttagtaaggagaatgatagaattaaatttgtgtattagaaagatcattgtggtggaggtatgaaagattctctgagtgacgcttaagagagtacaggatggaggacactatttgggtcagggaaacgagtttaatccagtttcatcacccttgtaataatccaagcaagaaatgatgaagggctggactaacgtagtggcaatagttggaaacaggaagacttgtgtttgaaaaatatttgacagagcaccgtgacctactgtggggcagatgagagcgatgaatgatcaggaagtcaagaatggtatcctgagacagagatacttctgacatgtcaaaaatataacgtgccatccttcatcccagagctacagaacaagacatgtcgattagccatccaggtcaaaggttccatgtggagctcaggagcaaggcctgagtgtgggataaaaattgtcattgcacacataggactggatgagctgaccctaagagatgtaggcagtgagatgaacataggagagaatccaggagggaagagaaagaagagcctaccaaagagacgaagctaataatgagtagaggctggacctgcacccagctctttggacaccaaacttttccaccgtcccagaaagttgcagaattaagccatctgtggcttaacatgccttgagagcatactgtgtcctaggatctttatacacattaccccatctaggacttagacacagctctgtggttaatgagatgatccccatcgacagataaggaaactgagtctcaggtcagcaaatgacctaaccagaaatatccaagtttgtcagactcctaagtctgtgctcatgttactaaaccatgtttctgcctttaagataagatatggctcctcactatttcctgggagaggcagacattaacagctatttacaattcaatctgagaaatgtagaaataaaggtgaatgctgagagcccccattcataaacaaaattctctatgcttttttttttttttttttgtaccatgtggtgatctaggagttggctggattgtgtataaatggtttttctctagtaagacgatagcaccgtccatttggagggtgagatgagccaccatggaaatacccggtcccacacatgcctgtggctaccctctaaaattcccaacctggccggaggcactcaaaacaaaacctcctgttccctcccaggacgactggcgcctggagcctgccttttgcccctgccagaggcttaggccagcctcggagtgatggcgttgcagggaggcagaacaaacggagctggagcagctccccactctgagcccagtcatctctcccagaagaggtgtgagcaggcttctgggctttgtcaccacagggaaactcggctgacgggcacattgccttagatgaaactaagccaatggcatgcactcatggagccagcttgagcatagacaaaaagagaggcaggagcacatggaaagaggcttctaatcccagctccatcatttctgatctttatgatcctgggcaatttgcttaccctcttcatgcctgtgtcttcagctataatatgggctgactgtgtttgactctatagactgtcagggtaactctaagtctgaatgcaaatgtacacctacaagtcacttgatatctgagttatgccccagcccatactgaattccaagtccccctagattataaacttcgggaggacggagactacatcacttattggctctgatgtctgtctttctatatcttttcatgtttaaaacagtagtttgaaatcagtgtgtatccaataatatttactgaatacttaatcagctaatgtaagatgttttagatagtagccattaaatacaactcatgaagttgacagaaaaacccacaataatcttggccacaggttatggagcaaagcaagtactaggggtactaccaacagagcaaagtaagtacttcaagaagccccaggagttagcccaagacaatcccatgaagcccaggccatgtgagggcagagtctgtgttgaaatagctagctgaagagttctgattgaccagctgggctagaacaactcagcttcatgaaatcttagaaaacctcaaagacaaaagagatattaaatatttctagtccaatcaattgattttatagctaaggagagttagttatagagagagaaataagttggtggttcataatttggatcctgaaagccctcctcttctatttactagctatttgacctcctgcagcttctatttcctcatctgtgaagtaaatataataataggacctctctcattgggttgtcatgagtgttaaatgtgataatatatgtgaagaacctagaagagtctgtagcatatgataaatgcaaataactcttagcaatgactattttattatttctatatgatttattattataattgttaactgatttaaaggctcatttcagtgggttttttccccaaccataattgttttaaaattggatttttgagaatcagtaggatctgttgatgcaaaactatacccatccttcaaaccatgcgatcttttatttaaagtaaaatgcagaactttatatggggccccctgaaatcaaaatgtgtttacagcttcatgactctgagccttgtctacatgactgtttctgcccgggctgcccttcctctctgcccaagcaagtatgtcctcctcgttcaaagccttgcttcaaggtggccatctctgtgaaatgctcactcttttcccaggcagtgagttattccttcctttgggctcgtactgcactcctctcttacctttttgtagcacttgccatgttttgttgttatttttttatttctacctggctgccctgtcagattaggaactccctgaggtaagcgaccatgccacttcattagtagtagtagtaatagtaatagtaatattttgccttattgttatagctttattgagctcagtgtctgacatacagtatgcaaccaaagtttttattactgtttttgaagtttttataatgatatttatatcagacacaaagagtacaccagatgtctaagtacagtttaaacaaaataccaaaatgaacaccagtattcccaccaccaaacctgtgaaagagaatattgccaataccttttaagtgtaagtttttaactgtgtgagtaaataaatgttacttgttttcttaattttgcttagtgttttagctctttgaggtaattttgaatcttgatttgaacatgtcccataataagctatttttccaagtgttagcatctgaaaatataagcttttcttctgtatcatcttctactccattattaagcatattgattaaaccaagaccaaggacaaatctagagacccctttacatggttgtgattactattgcctgtggttgttcagccagtcacctgactattccatcatacaagcctcatttcaaggagagctaacgtttatttggtgtttaacatataataaaccattgatatgtgacagcttacttaatctttacaaaagtcccccagcattcatgcattcctcccattttggagttgaggaaactgaggctcagaaaggctaccttacgtaagatcgcctagctgagaattgggcagagtcaggactagaatcacgatgggcctttgtcccgacccatagtttctcttctgttgttcactggtatatcagggaacacttaatggaaactttttagaaatgaagattccctaacctacttgtcatcaaggccagaaggttatgttcagtttgagtaagtctgtgttggctctaatggcccttgctttctgctcttcaaaacagatgaaagactcaaagaagtaatggtagcctaaaattaagactataatttggcagagacaaatatagaacctgatgcctgactgctttcagtttttgtaacactgggcatgttatttaactctctgcctcagtctacatatctgtacaataggaataataacagaatttttaagtgatttaatacctgtaatatgcttagaatcaggcctttactaagtacacagtaagtctcaactattgttgttgttgccaacagtgccgttattactgggaagtcagtgtcctgcatggacacctgtcatcaatgtagtatgatgagctccccttctttagggtcatggagcagtctccaggccaagacagccatcagcatggaaggggctttcacaaaaagatttttaaatatttaggtttgttgcaaaagattaaacaacacataagtacacaagtgtacattctttctctctctctcaaaacaaactaggaattcctagattcttctaagaacacagggtttgagagtgactagaagtactctttgtttccttgctttacacaggatgtctgaggagaagcatgtgctattccagatgagtgggcacaaacagaggtcaactcaaaactttctccctggacagagccaagcaaaaccattctctgacatttctgagcagcaaagcagcaaagccacaatcttctaatgaagtcttgctgcagctgatgcagtaacatccccaaattgtgggacaggggatggggagaagggaggtgaagtgtatccttcctaagcaatttatgcatacaagtaaagagcattatcatagagtttgaggtcaacatctgcctcagttgaaatcccatcgtggtcatccatgtactaaccatagacaacttacacaacctcttggggactaatctgtcaaatggggccaagagttctggaggcaaggggctgcaagacacagaaagagatgacttggctttggctctacctgtgcaaaccctgggtcctaagtggtaatgaatatggactgcctcattcatctcaaagaagctctgggacttaggaaagcaatttctagaattggcacgtgataaaattttcactgggcaaagaaaggcagagtggtgaaaataagtaccagttagtatgctctccttgtggctggaacattcaccatagctcactcgtgcattctttctctctcatacacacaacactcacactcacccacctgaataatttccatgcatgttttaaatcttaattcatgtaccatttccttggagaagcattccctgtcacctagactgaattaggtacctcccttgtgtgctctcttactaccttttggctttccctcatttacttctcacagttggtaattacatatttgtgtaatgatctgattaatatttttcttaaggtagccagttgccccagtttggctgaaactgaggggttttccagaaggcaagactttcagcgctgaaactgggaaagtcctggccaaacctgcgtaattgttcactctggtctgcttccctctcaagatcggatgctctttgagtacaggcactatgctcttgttcaccatttatctctgtgcctggcacagacctggactgggaactcaggaaacatctgttaaccagtaaagaagtaaatgtatatgttaatctaagctgaacttacttttcttatgaaagcctatcttttttctccctgaaattattctattttgatgttaaaatatcccttttgaaaaactgtccttatttgacaaaatttaaagttcacaatgttatgctgtttttgttttttgccttccttcccccccttcccattttgtggttggaaatcctactgatttgaggaatcacttgtttagtaaagagagaaccggggtagctgaggtcaagacaaataaggtctgtccccatgctaaaatgctagtaatcacttctgtatcctctgggcctagcacattaccaagcacatagtaagggctgagtaaatatttgtgaaatatataaatgaatagattttctgcccagcctcaagacctgctggaatacaacttgtatgcctaactcccttttcttccctaccctctagctaaacatttctgtgaccataaatgtgacttcagcattccttactgctgaatagatgagaaacatgtaccactgcagatgaatgaacacatggtctatccccacccgttctagttcatctctttaaatgctttccttactgttgaagggactgctatggtctgttaaaaaataataataataataaaataaaaaattttaaaaaaatggcactatcttgattactgagagcacctctcttacccacatggctttgttcaagctcctccctctacttggaacacctgtttcactttagcaaaatcctactagtcttttcaaacttagcttatgtccctttctctaagaagccacctctgtacccttccacttgtcaaaagtaaaatgagaacaagttagggaaaaatttgaaagttttctatcttacaaaaagtaccaattgccatcagcaagacttcaagtggtaagaagctcaccttacggcagttacagtgcagtttatgaagcattaaggagaaagtattttgacctttttagtcattggctgttatgtattaacatttttttttcaggggaaacaggactgtttaaactgatttgtctatagttgattgatttaattttcctgaatcatgctgacaaggacctaaagcttatgttttaatttcatcaaatcatgctgacagggagataaagcttatgttttatgctttgtttataatgagagctagcaactcagggaaatcagaatgacttaagttttaccacttgactctgggcagttggccttggggtatatatctaaatggcggcctctatctttgtataatctttagtacattcctcacctcctgtgcccatccacaatattttgtattttgtctttaccatctcatgaaccacactatattctatttgtctatttttttgtatagctcctccactagatgggagcttcttgaaagtaagaactctgattcatctttgtgtccccagcacccaatagggggacaggattgctattaggtagcagtacatatttgtaaaaggaaagaaatctatcagttattatagtcccccaaatgctaagttacagacaaatagaaaaccttagtgacaaacaacagtagacatttatttttgctcacaagtttgttggttggctaggtgagtctgatgatctgggctagtcaatgctggtcacctacaaatatttgctgatgttacctgggttctttcatatatgtgggacatcacctgagacaactgaacagactcagctctgttgcacatctcctgtcacccagcagccttgtagggcatggtcttgtggccaagtttgaggagcgaaagacagaacagaagcacacagcccttttgagacctaggcttggaaaactgacccagtgtcacatctgcctcattctcttggcaaaacaagtcacaagactggcatagattgaaggggtagggagatagacccacatctcaatgtgaggagctgcaaagtctcattgcaaagagtgttgacacaggaagggtggagaatggggaccacctttgcaatctctgccatagtgagggagccaacagggaaacaccttatcagtttctttccaaaatgaccatttttattaccttaacatttaaatgaatttatcaggaaagtttctaaaaaaaggagccatggcctttcttgggagagagtgacttccccaccataaaaggcattcaataagaagctgaattccatggtcatagaaatattaggaggagaacccttcccctacccctgagagtcaatgttttcacatattttccatctttctttccagatcagcaaagacccgatttttgtaccaggcgtctgggggccttatttctcagccatggtacctgggttctggctgaatgaaggtggtcagagcgttactggaaaattggtaagttgacactttctcaatagggtcatggatgtttttatgtcattgattagtccattttgtcacatgacccatatacccaatatctggaggatttgcagacccctgaatcggggtgtactttctcttagtgcacagcctaacatgtcatacacatgcagcatatattgcttaaggaagaagtgttacagcaggcagtgatgaccagcccttcttctcacctgatctttccttacatcaatccatttttctcagagtgatgagaatgatattctacttagagaaaacgacatgttactccccagcccaaatccttcagttttccccatagccccttgagacatggctcagataatattctggctgcattatacacttcatggtctatcccctccagtcccacacatgtgcctgtaatttacactaggttgctctcctcacagcttctccatgcctcctgtcattgcacttctctgtccctttatacaggcttctttccctgcttggggagttctttaccacctcaataattttacttgtcctttaagatccaactccagctcttagcacactctgttattcttattggttactaatccccttttctagaacactctgagttccttaaagacaagggccatgcggtacacagtggctcatgcctataataccagcactttgtgaggctggggcgggcagaccacctgaggtctgaagctcaaggacagcctgaccaacatggtgaaacctcatctctactaaaaatacaaaaattagctgggctcgatggcaggcgcctgtaatctcagctactcagatactctcctaagacaggagaatcacttgaatctgggaggcacagattacagtgaactgagaatgcaacactgcacttcagcctgggcgacaagagcgaaactccgtcttaaaaaaaaaccccacaaaataaagacaagttctctttgtatccacctcagtgccaggttcatagaaggtacttaatacaaacttgttgaattattaaggctgtccaataggggagagagaagattcataaaagtgagatgagtgctgtaacagaagtacacggtacagagttggcacaaagctaggttaggaaactctttacaggggagaaggcattggtgctgagccttaaaagataaataaggacaaaccaggtaaagaagggtacagatagtctacttggtaggaaacttgtatgggaaaaaagacatggaagtgaaaaataacggctaatttgagggtaatggcaaatagtccagaagttcagctgtggcacaaactattcttagaaaaatggcttacgataaaagttagagagtagggcagagaccacatccctgtaaaacatgctaaggaattgaacttcgtctagcagaccaagaggaaccagtgaaaggttagaagagtatgtggacatgttcataactcagttgtaaaaatctctgcttagaagccatgagggtaaaggcctgaggacacatggccagaggcagggagactagttttagtaggttagtcaacagacaaaaagccacaaggacttgaatgaggacagtaataatgatgactgggaattgaggtcaagagattggcaggcttctgagagatcaaatgtggaatacagagaaagtgagacctaggctcagttacacacactcacatttactgttaaattggaaatatctgcttatgttatgatgtgatttgcctaccaactcttctaaatgttcagccaattggaaatgatcttattcaaagctggatgtatatgcaaatatctgtgagtttacatttcttagtataatcctattttatacatgactgcctcaaattctctttcaaagtaaatggaagcataggtgggtagatggattcaaagggcatgttctgtacgttactgttgtgccaggctacagaaatgaattaaatgaattggacctcatcagtccctggttttaaggagctcatacttggatggggaatccctgagtatgaaataaatcatgtttgattggtctcagtaaccagtgctagaaaagttgagaaggaagacatcatctatggctacagtacagtagaaatgcagcccactttatattctcctatttaaacttgtgctatgtacttagtcaacttattttattttactttcagttccgggatacaagtgcagaacctgcaggtttgttacataggaatatgtgtgccatggtggtttcctgcacctgtcaacccatcatctatgttttaagccttccatgcattagcaatgtgtcctaatgctctccctccccttgcccctaactccccaactggccccagtatgtgttgtccccctctctgtgttcatgtgttctcattcttcaactcctgcttatgagtgagaacatgcagtgtttggttttctgttcctgtgttagtttgctgaggatgatggcttccagcttcatccatgtccctgcaaagagatctcatgcctttttatgaaggcatagtattccatggtgtatatgtgccacaatttcttaatccagtctatcactgatgggcatttgggtcggttccatgtctttgctattgtaaatagagctacagagttccaagatggccgaataggaacagctccagtctacagctcccagcatgagcgatgcagacgaccagtgatttctgcatttccagctgagatactgggttcatctcactggggcttgtcagacagtgggtgcaggacagtgggtgcagcccacagaccgtgagccgaagcagggcgaggcatcgcctcacccgggaagcacaaggggtccaggaattccctttcctagccaaggaaagccatgacagatggcacctggaaaattgggtcactcccacacggctactgcgcttttacaatggtcttagcaaacggcacaccaggagattatatcctgcgcctggctcagagggtcccacgcccacagagccttgctcactgccagcacagcagtctcagatccaactgcaaggcagcagtgaggctggggtaggggtgcccaccattgctgaggcttgagtaggtaaacaaagtggcctggaagctctaactgggtggagcccacctcagctcaaggagacctgcctgcctctgtagactccacctctgagggcggggcatagctgaacaaaaggcagcagaaacttctgtacacttaaacgtccctgtctgacagctttgaagagagaagtggttctcccagcacagggattgagatctgagaatggacagactgcctcctcaagtgggaccctgaccccctcagtagcctaactgggagacacctcccagtaggggccgactgacacctcatacaaccaggtacccctctgaaacaaagcttacagaggaaggatcaggcagcaacatttctgcaatatttgctgttctgcagcctccactggtgatactcagggtctagagtgaaacgccagcaatctccaacagacctgcagctgagggtcctgactgttagaaggaaaactaacaaacagaaaggacatccacaccaaaacccaatctgtacgtcaccatcatcaaagaccaaaggtagataaaaccacaaagatggggaaaaaacagagcagaaaaactgaaaattctaaaaatcagagtgcctctcctcctccaaaggaacgcagctcctcaccagcaacggaacaaagctggacggagtatgactttgacgagttgagagaagaaggcttcagacgatcaaactgctccgagctaaaggaggaagttcgaacccatggcaaagaagttaaaaaccttgaaaaaagattagatgaatgtctaactagaataaccactgcagataagtccttaaaggacctgatggagctgaaaaccatggcacgagaactatgtgacaaatgcacaagcctcagtagccgatttgatcaactggaagaaaaggtatcagtgatggaagatcaaatgaatgaaatgaagctacaagagaagtttagagaaaaaagaataaaaagagacgaacaaagcctccaagaaatatgggactatgtgaaaagaccaaatctacgtctgattagtgtacctgaaagtgacggggagaatggaaccaactgggaaaacactctgcaggatattatccagaacttccccaacctagctaggcagaccaacattcagattcaggaaatacagagaatgccacaaagatactcctcgagaagagcaactccaagacacataattgtcagattcaccaaagttgaaatgaaggaaaaaatgttaagggcagccagagagaaaggttgggttacccacaaaaggaagcccatcagactaacagctgatctctcggcagaaactctacaagccagaagagagtgggggccaatattcaacattcttaaagaaaagaattttcaacccagaatttcatatccagccaaactaagcttcataagtgaaggagaaatgaaatactttacagacaagcaaatactgagagattttgtcaccaccaggcctgccctaaaagagctcctgacggaagcactaaacatggaaaggaacaactggtaccagccactgcaaaaacatgccaaattgtaaagaccatcaaggctgggaagaaactgcatcaactaacaggcaaaataaccagctaacgtcataatgacaggatcaaattcacacatagcaatattaaccttatatgtaaatgggctaaatgctccaattgaaagacacagactggcaaattggataaagtgtcaagacccatccatgtgctgtattcaggaaacccatctcacgtgcggagacacacatagtctcaaaataaagggatggaggaagatctaccaagcaaatggaaaacaaaaaaaggcaggggttgcaatcctagtctctgataaaacagactttaaaccaacaaagatcaaaagagacaaagaaggccattacataatggtaaagggatcaattcaacaagaagagctaaccatcctaaatatatatgtacccaatacaggagcacccagattcataaagcaagtccttagagaactacaaagagacttagactcccacacaataataatgggagacttaaaccaccccactgacaacattagacagatcaacgagacagaacgttaacaaggatatccaggaatagaactcagctctgcaccaagtggacctaatagacatctacagaactctccaccccaaatcaacagaatatacattcttctcagcaacacaccacacctattccaaaattgaccacatagttggaagtaaagacgtcctcagcaaatgtaaaggacagaaattataacaaactgtctctcagaccacagtgcaatcaaagtagaattcaggtttcagaaactcactcaaaaccactcaactacatggaaactgaacaacctgctcctgaatgactactgggtacataacaaaatggaggcagaaataaggatgttctttgaaaccaatgagaacaaagacacaacataccagaatctctgggacaccttcaaagtagtgtgtagagggaaatttatagcactaaatgcccacaagagaaagcaggaaaggtgtaaaattgacaccctaacatcacaattaaaagaactagagaagcaaaagcaaacacattcaaaagctagcagaaggcaagaaataactaaaatcagagcagaactgaaggaaatagagacacaaaaaacccttcaaaaaatcgatgcatccagaagctggttttttgaaaagatcaacaaaattgatagaacgctagcaagactaatgaagaagaaaagagagaagaatcaaatagacacaataaaaaatgataaaggggatatcaccaccgatcccatagaaatacaaactaccatcagagaatactataaacacctctatgcaaataaactagaaaatctagaagaaatggataaattcctggacacatataccctcccaagactaaaccaggaagaagttgaatctctgaatagaccaataacaggctctgaaattgaggcaataattaatatcttaccaaccaaaaaaagtacaggaccagacggattcacagccgaattctaccagaggtacaaggaggaactggtaccactccttctgaaactattccaatcaataggaaaagagggaatcctccctaactcattttatgaggccagcatcatcctgataccaaagcctggcagagacacaactaaaaaagagaattttagaccaatatccctgatgaacatcgatgcaaaaatcctcaataaaatattggcaaactgaatccagcagcacatcaaaaagcttatccaccatgatcaagtgggcttcatccctgggatgcaagactggttcaacatatgcaaatcaataaacgtaatcctgcatataaacagaaccaacgacaaaaaccacatgattatctcaatagatgcagaaaaggcctttgacaaaattcaacaacccctcatgctaaaaactctcaataaattaggtatttatgggacatgtctcaaaatagtaagagctatctatgacaaacccacagccaatatcatactgaatgggcaaaaactggaagcattccctttgaaaactgtcacaagacagggatgccctctctcaccactgctattcaacatagtgttggaagttctggtcagggcaatcaggcaggagaaggaaataaagggtattcaattaggaaaagaggaagtcaaatttttcctgtttgtagatgacatgattgtatatctagaaaaccccatcatctcagcccaaaatctccttaagctgataagcaacttcagcaaactccccggatacaaaatcaatgtgcaaaaatcacaagcattcttatacaccaataacagacaaagagagagccaaatcatgagtgaactcccattcacaattgcttcaaagagaataaaatacctaggaatccaacttacaagggatgtgaatgacctcttcaaggagaactacaaaccactgctcaatgaaataaaagaggacacaaacaaatggaagaacattccatgctcatgggtaggaagaatcaatatcatgaaaatggccacactgcccaaggtaatttatagattcaatgccatccccatcaagctactgatgactttcttcacagaattggaaaaaactactttaaagttcatatggaatcaaaaaagagcccatattgccaagtcaatcctaagccaaaagaacaaagctggagacatcacgctacctgacttcaaactatactacaaggctacagcaaccaaaacagcatggtactggtatcataacagagatatagaccaatgaaacagaacagagccctcagaaataatgccacatatctacaactatctgatttttgacaaatctgacaaaagcaatggggaaaggattccctatttaataaatggtgctgggaaaactggctagccatatggagaaagctgaaactggatcccttccttacaccctatacaaaaattaattcaagatggattaaagacttaaatgttagacctacaaccataaaaaccctagaagaaaacccaggcaataccattcaggacataggcatgggcaaggacttcatgactaaaacatcaaaagcaacggcaacaaaagccaaaattgacaaatgagatctcattaaactaaagagcttctgcccagcaaaagaaactaccatcagagtgaacaggcagcctacagaatgggagaaaatttttgcaatctactcatctgacaaagggctaatatccagaatctacaatgaactcaaacaaattcacaagaataaaagaaacaaccccatcagcaagtgggcgaaagatatgaacagacacttctcaaatgaagacatttatgtagccaaaagacacatgaaaaaatgctcatcatcactggccatcagagaaatgcaaatcaaaaccacagtgagataccatctcacaccacttagaatggcaatcattaaaaagtcaggaaacaacaggtgctggagaaataggaacacttttacactgttggtgggactgtaaactagttcaaccattgtggaagtcagtgtggtgattcctcagggatctagaactagaaataccatttgacccagccatcccattactgggtatatacccaaaggattataaatcatgctgctattagacacatgcacacgtatgtttattgtggcactattcacaatagcaaagtcttggaaccaagccaaacatccaacaatgatagactggattaagaaaatgtggcacatatacaccatggaatactatgcagccataaaaatgagttcatgtcctttgtagggacatggatgaagctggaaaccatcattctcagcaaactatcacaaggacaaaaaaccagacactgcatgttctcactcataggtgggaattgaacagtgagaacacatggacacaggaatgggaacatcatacaccagggcctgctgtggggtgaggggagtggagagggatagcattaggagatatacctaatattaaatgacgagttaatgggtgccgcacaccaatatggcacatgtatacatatgtaacaaacctgcaggttgtgcacatgtaccctaaaacttaaagtataataaaaaaataaataaaatattataatgatggtaatattaattgtaataattgtagcttactgagtatttttttgtgagagggatttatagacataattctgttaaactttgaatgatagtcataattacaatgcctaatattattttgaaggcttgtttccaatctcagttccaagaacttttcatgtattatctaattaatattctcaaaagtcctatgatcatacctatagatacagtcattatctgtattttatagttaagtgactaaaggtagcaattacagcctggagagtctcctcacccaccagtgatggccttttaatatgttttatttactactcacctttccttaccatttactaattcttgtttattctcttgtaaattccaatctctggttttaaaatacatcattgtcacataggacatgataagaaaaagttgcatcttttttattcccgcttgcatatgcacatcttctctaataagccacatctgaaggtgtctgctccagtagtacattgtccatggtttcaacgatgccacacagtcataaatacaccacctaaagcataagagacgggaagtgagaaaacagagaaaaaggaaagtaaaggagaagaaacaatagaaaaaaagagaaggaaaagaaatgaaaaatatattaaaaaccatggattttaaaaaaagatatttgtctcatttttacaattaaatgcagatcttccattacaaagcaattatttcattctaagtatgtgaatagatttgtatttttaaaaaaaatcttcatctggttatcctcagaatgaaggaaaagaaacaggacaggatcttttgatatttacttcttcttagaaaacacatactcccttcctaaggatgattgattttagtttcatcacacatcaaggcctgtctcatgcttgccgatattctcttctgaatagttgtgcaaaaaagcattgctttttccccagactttgtccacagaacactgaccccgtgcagttcctacatccagatactgaagcttatttccagctggaccttggccatcaccctttccaggtgctcttgtttgtctcacgtggagtgatttttattggggatggcattgggtaaggaaggctaagacaagttcctaagccactgctatggtggcattgactttctggaacaattgtgcttggattgagtcacaaggtcacaatgcaacaagttactatgtgctcttgggattttaggatgtgtacattgtgagtgtctatctgcctcctgcgtcattgccaaggctgggactagcctcaggatgtcacctatggaagacattctgctataaatgggtgtatggaatgacttgcagtgtgcacagtgtagtacagattatggagataatgatttcatgccttcattcattcactccttccatcgcgttacagagatttcctgagtgattccactgggccagccaagaatacggtcactccagtcatccaccatcaaataagaaagttggatacagaactgatcattataatttattgtaggacataaaaatagatagtacaatcactatagcctactggaaaaatagaggctaatactgagtacctattatgtaccaaatatttttaggcccattaggatttggtatttcatctgatcttcacagcatgtgtatgtggtcagtgttgttatattagttttactgatgaagaaataggctgagaatgtcaaggtaatctgatcaaaatcttacagttataagtaggagagccacaatgcaaacccaagctggccaccagaggcccaagatctttccaaaactgaatctgacttttgtggaggtgcatttctgagtttttctttcagttctcttgtagacttctttgagaagcaactgttgtccgttaacatgacattctctttaagtgtcttgaaacaaatacagttggcaggctttgtaaggccatgggagaaaaataattaaatacaataaattaaatacaatatctgaaatacatatatagtagatgggcctaagagctgactggagatgacaaaagtgtcctcagtgagaatgagacttagactgggagacttagagagaaagagagagagagagaatatgaatgagaatatacactgaaaaaattaacaccctcagtctctcaggggcatgggagacaatagccaaaggtcaattagcattgacacgatctatgtacagatgtaggtgtgtccccagcatttcacatccactaattataattacttcatggatacaaggactaactctgcaaaaacaaatgcctccctgttcccttctcccgccctggcttttgcttattttttgtatacccacctggattgctacacaacttcctaattggcttcttgcctgtaatctttccccctctaatccctttgttgcattgtaggtatagaagtctttctgaaacagttatgagtctgtcacttgtgatagctcttcagttgtcattagaataaagtcttaattctttagagtgatgtttatttatacagccagtatttacggagtgcttactatatttgaggtactgttctgagtgagaaagtagcagtgagtaaaacagcctcttctgcactctcctgcactccaccaagactcctgtacccttctcaagcttacattctaacaggaggagacagataatacacaaaaaataaataaattccactttatggtataagttattaagacaaatagaggaggtagcttgtgagttcagatgggaaggttgtagttttaaatagggtggtcagggtagacctcactgatgtgacagttgaacaaagaatgaggaaaggaaggaatttagctattttgaaacctgggggaagaatataccaggtcaagggaacaaccagtgtaaagattctgagagggttgcttgcctggggtattatgggaatagcaacaaggtcacaatggatgcggcagagtgaaccaaaatgacagttgcagggaacaagttcagagaggtgatagggtctacattattggccacagtaatagtttttactctcagtgaaatggaaaccattggagaataatgagcggaggagtgatgtgatatgacaggttttcaaagaatcattcttactgctgcctactgtgttgctgattgttaactggggagtggaagtagggggagggaagcacagaagtcagaaagaggctattgtagtaagccagctgagtgaggaggatgatggcatggagctggtaaagaatggttagattttggatatattttgaaggtagagccaccttcaaaccttgaccttgaccttcacaccctgatggattaagtgtgaagtgtgcagaaaagagagaggccaaggcttgaggaatgtagcattgctattaatgggtgaaggtggattcaatgttatggagtcagagggaggaaggagtcaagaattactacgttttctgatggtagtaactgatccccaaagttgaccctccattatcttccttcatcttagtaaagagtaccatcatttatatttttattaaagccaaaaaataaaataaaaaattaggattaattcttgactcttcctttcccctctctcctcacatctaatccatcagtaagtcctaagggttccacctccaaaatatgttgccaatccatctctcttttttcttctcttttcttttcttttctttcttccactcctagcactgttgggcaaatcaccgtggcacttttcctctcctggtctatgtaaagtatattttttgtacacagcatatagttgggtcttgcttttcaattttatgatctctgaattttacttgggttgtttagatactttatataaagataaatatgatttgatttacatctttcattttgttttttgttttctgtgatcacttctgtctttccttcctgacttcttttggattaaatgactatttttcaattttaagaattcaattttaagttatctattggcatcttggctttctacacatctttttgcattattttttaatggttgctctagtaattataataaatatcctaaacttttcagcctactttgaatgcatattatgatacttcatgaaaggtataaatacccttcaactgtgtagttctacttaccactcctatcccagctcttcacgctgtagtttgtgtgtgatatctacatatgctataaacccaataatgaaatagttgtcatattgtttgctttaaacaatgtattagtctactcttgactaccataacaaaataccacaggttgggtggcttaaacaacagacatttatttccttacaattttggaggctaaaagtctgtgatcaaggtgctggcaaatgcagtttctggtgagggctctcttcctaacttgtagatggctgccttctgtgacctcacatggccttttctcagtatgtgtatatgaagagaaaacggttgtattccttccttttcttataagaacaccagttatatcagattaaggccccactgtcatgagctgtttaaccttaattacccccgtaagagccatatctctaaatacagtcacatttgggattgaggcttcaatatatgaatttgaggtgaacacagtttagtccatgtcaaagatacataaatgttttaaagaaattctgagaaataaaccatagtcttttgtatttacctacataattactatttttattgcttttcctttctttctgaaaatttgagtttccatgtgatatcttttcccaagcctaaagaacttgtcttagcctccgtctcaaaaaaaaaaaaaaaaaaaaagaacttgtcttagcatgtcttacagtgcaggtcaactggcaaaagacattctctctattttttttcaatgcatttattttatatgctgccttgaaagatatttttgctcactatagaattcttgatttacaggtttttttttccatcagcaccttaaaatgttagtattttctattctgacattattatttcttataagaagtcaaccattatttttgtcattctttccctttatataatatgtcatttttttcctctggctgctttcaaattttctcttaatctttggcttttattacggtatggcgtggtcttctttggattcatctttcttgaatttgtaagttgattcctttcaccaagtttgggaaattttcagcatttaatttttttttgtttgtttcttctccttgctctcttccctcttactgtgactccaattccacatatatggtacctttggctattgtctcccatgcccctgagagactcagggtgttaattttttcaatatatattctcattcatattctctctctctctttctctctctctaagtctcccagtctaagtctcattctcacgaggacacttttgttggtcatctccaatcagctcttaggcccatctactatatatttatttcagatattgtatttaatcaatactattacatttgtattttaatagtttgtttctttgctgtttcctctctgtttaataactatgagaatatttttcttttacatccttaagcattgttaaaatacctactttaaaattcttatcttctaacgcctgtgtcacctcagatttggtgttcactaagtggcttttctcttaagtatggattacattttcctgttcctcaatatgtataatgatttggggtcatattttggacattgtgattgatatattctagagacactgtattatttctgtttctcttttgagtattgattttttggtttagcaggcagtttatttggctgaactcaaacttcaagttttgttactctcctgtgatgaacatgtcctaaaatctctgttgcattattttagccttagctggactacttctggtgttcccatgcacatgtaattgagagatcatccagaaattagggtagcatttataggcacagtgttgcattccctttctatggctctctctttctgacatcccctccacaacttacttcctagctactatggttgccttgaactctaacctctcatttcttaatcagaaagactgtgtatttctatctgagtattagttatcttgcatgccactgactggggtccacccatgggcaaaaatgtataaaatcaggaaacacacaaagtactgttttttccttccttgtgtctactcctctccagtttctacctggttttggccactttccagtgtcttcagagaactatttgctgtattttgatcagcatttttaattgttatcaaaatgtgtctcatcattcattcattagagatgtcagcattgctctaggcactgaggagtggaaaataatgatgctcttgctttgaaagagctcagagtatagggtaagagacagacatataactaaggattgtaaaagaacttgatagatgctacagtagagtaaggatagaaaatatctgtgccttatattcccattgccaacctgtgatctttgtctgcatttcctattctccatgcctggtcatctccctgtcctttatacattaccaaatttttcttaacttttcatcatttttctctccaaatcaaaataatttttatggcctttgatctaataaaagtataaactcttatgacattcaagacacactgtctgccttcgccctctttattcatccttattttcaccagtttactaattctgtaatttaacctacagtaatcctatgaccaatgtatgcacaacacaaatagatacaaatgcaaagtgtggtaagtgccaccaaggagaagtacatggtgctatctgtgtttttcctgtggttcactcatcccacatttattccacaaacttttattaaccacccatgttatgccaggcatgaggctaaaccagtccgttaccattcaaatcatatatgtctttccattttcatgtctctactaaccagcctcctttctgtcatgccttgcctctagccctttactcctccaaactctacctatttatggcctctcagctgaagcttcacctactccaactgtataatgattgccaaatgattgatctctcactttgtgctgctatgcatcataactatttcttatttttcagtgtatctccggaacctaggtgcacagttcctggaggcacattaggcatttagtaaatactaaataactgcattcatgcttacaccacacatgctaggttctagctcactcctggaagctcatttaaatctctcttctctgaactcctaaagcacttcccataaaaattagcatcaaatcaagtaatgcctctaattatccattactgttcccagcgagtttatcttgatgctctcagtggattgcaaactcaggggatccaaagtgtgatgaggatatgcttcatcacagtaatgcaaagttgaacctgaaggagataaatattcaataactgcatgagtttttttttttcattgaaatgaccaatgtctttgatatcattttgaaacatttccacaaaaactgcaccaatggtattcaacaacgtatacctggaagttcagtagacaatatgacgtggtggttaagaacaaggtcttaaaatatagagactgcagtttgagacctagatttgtcgttactttactgtgaccttgggcaagatattcaatctctttgagctcagtttcctcatctccataatgaagaatagtatcttctccataggagtgctataaggaataaatgaaatagagtaatgtgtgtacaatgcttaagttagtactgatgtatgggaaatgagtcagtatatttcacgtgatatcatttatactactgttggcactatagtagtgtattagtccgttttcatactgctgatacggacatacctgagactgggtaatttatacagaaaaagaggtgtaatggacccatagttccacatggctggggaggcgtcacaatcatagcagaaggcgaaaggcatgtctaacatggcggcaggcaagagggaatgagagccaagtaaaacaggaaaccccttatgaaaccatcaaatctcatgagacttattcactactacgaaacagtatgggggaaactgcgcccatgattcagttgtttcccactgggtccctcccacaacatgtgagatttatgggagttacaattcaagatgagattttggtggggacacagacaaaccatatcaagcagacacacttaacttcctagaaatcctgtttaaaaggaggccatggaagttcaaaacagtttagtgacttgcacaaagtcactcagctagtgagactcagagccagaacccaaccctggcctctgtgtctcctgaacaaattatcttctttacacagccctagctctcaggaaacatgctcagagagcctatccctgtgcagccaaaagaccaaatcttttccttgttggaatgaaaataaatctatcagaatggttgttttagcatcctagaaactcaagtaaacattcagaaaatatacagatgaggttcaggaactcaagcacggtgttgcttgggtgtgttatggcaagcagagtaaatgcatggagaaacatttctgtccctgatacatatttcatactattttgtttagagccaccaagtggattaaggaataagatcctagacctgggatttcaaatgagaggtgattatctgcagagctcagacatttctgtccttggagagctgtgtttcccatgtgatgattgttcagtcaggagagtttctcctgacaggtctggggcatctcaattttttttaactgagagtttcaaaaaatttttttaatgagggttttttcaaaaaccctcatcatagtctctttcattcagcttctccattagtaagacacagtgagtaattcaaggtttgacattgcccagggatgacagcctagatcaagaaggggaaatgatgtgatccagaaaaggttggtgcttttaacactcagaccccccccatttgacataagttacccttccttctcattcttgggcctgttgctaacctgcttctaccagtttagccttggaaatttcatttctgtttactcttctctctaaacttctttgttttatgtatttaagaggctagcagtaggttaaatcaaagctaaatttcttttagctgaggcactcttgctacattggcattttaatgttcttggaacccgtatggacaaagagttgaaagaaacatatactcattttaatataaatttttctatcttatacataaattaaagaagctataaaattgacccatgtctcttatttttcagatagaccacatggtacaaggccatgctgcttttccagaactacaagtaaaggccacagccaggtaactgctgtctctgttccctctaaaattttccttgtgtgactgtattgagagaattcacgttgggcagttgggtgattttcagatcctacagacaatgaaaatgcctgttagtgcttgaaagatagtcacctggatgatccagaagatagatgtattaattctttaaatgaggtaagagaacttagagaacctagagataccccaagaatatacccagggactatagataagaaactctgatgtagaagaaggaccatggattctggagtcaaaacttcttagtttcacatcccagccatactccttaatagatacaggaccttgagctagttacttaacctctttatgcctgtctcttcatctgtaaaactgaagataataactgatatggagtgatttctagaatattttgaagcaagctgagtgcaaaaaaaatttacgatatactccctttcatgtaaaaagaaagacataggaaaatacatgtgtatctgttcatttttgcaaaagaaatataggaagtggccaggtgcggtggctcactcctgtaaccccagcaccttgggaggccgaggcgggcagatcacgagttcagagatcgagaccagcctggccaacatggtgaaaccccatctctactaaaaatacaaaagttagccgggcatggtgatgtatgcctataatcccagttacttgggaggttgaggcaggagaattgctcaaacccgggaggtggaggttgcagtgagcagagatcgtgccactgcactccagcctgggcaataaagtgagactccgtctcaaaaaaaaaaaagaaatacaggaagtttaaaccagaaaataataagattagttacctacagggggtgggtaggaatggggtggaaagaatgtgggaatgggaccatggtagtaggaagaaatgacacttctctgagtatacctttttatataactataactcttagaattattgtcatgcctcatgtccctgataccccgataaaataggtgatagataaccaggatatatgtgtatgttggcatgggcaaaatgaaatgcacacagtaaaaactgaacctactgtattacaaagggggttgggaaaagaaaagaaaggaaaagaaaaaagaaaagaacctaagtaaatttgggaaagaatattttgactatatgccatatggctaaagagaaaaataaccatacataaatattatactctaattggtaaatctgtttttcataggtgtatatgttagctatagtgacaactctttatgtgtatgctacagttgagtgaagaaatcaatatattgtggataataagagccaggttcctcacaaatgggaaaaggagaaggttagaatgaacctcatggtgtcaatatcaacttatgattttatatatatatatatatatatatatatatatatatacacacacacacacacacacagctggatataaatataagtaaatatagatatgtatattcatgcatgaatatacatgcatatactccctaggtctctctgctgagatggcttggaagcaatgacacgatagtagcaatgtgtgtacctagctcacaggtactgtattctaagtaccattctcccatttctccaataaaagtaatcaggacttcttagaaagatggctgagtctacgctgcggcagtaaaattatggtgccagaaagaaaaaagttactcaacaaggaattgtcaaggtacattggaaccaactttaagaatctctcagtggcctactcaggataaaataaacagtaatagcgtaaagtaagtccataagtaaataactttgtaagtaaactactgaagaaggaaataaacgaggacgaaatgacaggtcttcctcttcactgtcaggacagtagccttacaattaataaatgtagaagaaataatggaaatagataatcaacattaggtaaacactacagagataaatgttgtaggcaagaatcattaatggatgctaaaattagtgagtaaaagtgggaagcaggatattttcataaacccagaggatttcagtacaagatactgagtaataggaagaggaaaataataactttccagtagtatataagtatggcagacaccaccttacccaagtgatgaaagtaaacaacaccagcaataacatgtagtgatatcatgtatctccttttatgaggcaccgataaagatacaacatcatttctgccatgttcttgcccaaaatgattaaactcagtgtaaatatgggaagcatcagacaaacctagattgacattccacaaagctattagccagtttgctccaaaggaaaattaagaaacttaaatactgaagaactgtcctagattggaggagacttaaggaggtactacagctgtaagcagtatataatcatggattcaactctggaccagagaaaggacattggtggaggaaaactgttgaaattcaaatagagattaatagtattgttatttatggcaatttcttaggtgatgagtaaaagggaactctgtgtattatttttgtaacttttgtgtaaatctaaaattattttgaaataaaaagtctaaaaaataatgaatggattttcatgctgataatgcttagttgtcaggctgtttaagtaaagtaagatatttttatagaattatcagagaaacccatgtagctagctagcacaggacaaaagagagatagtctaaggtggccactaatagactctgaagccaaattgcctttgcctcagctttgtcgcttattcactttctgtttctgggctatttacttaacctctgtgccttagtacctcactgtaaagggaataatagtaaacatttcataaggttgttgagaaaattaaatgaattagaataatgggtgatacagagtgatgattaagagtcaggctgtaataggtgttcaactaaaaaaatggtaatgataaaaattactgttggggaacatcacacaccgaggcctgtcgtgggatggggggataggggagggatagcattaggagaaatacctaatgtaaatgacgagttaacgggtgcagcaaaccaacatggcacatgtatacatatgtaacaaacctgtacattgtgtacatgtaccctggaacttaaataaaaaatgaataaataataaataaataaataaatgattgttgtagttagtatattagacatttccattctactaagtgacttacattctaataggatcagcacacctacacagagcagaataaatgaatactgtagtaaaatatacgtagtgtgttatcaggctgtgtagaaaaggaggactgattttgacaaggagtttaagaaaagcttcataggcattcccttctaggagtctttagttataatgccattgcaattagtcattaattacaattaccattgagagggattatgtcacataaccttaccaactagcatattagtggcatagagaccatataacctagaaaagggattcctaatttcggatcatcaatgaacctctttaaattgtgtactgttctgctgattacataattctgcatgtatttctgtgaagggaccataacggtcattattttcttaaagggtttaagcatttataaaccactaagccaaagaaaagagcactaaatttatagtctggagacctgaatccaaatctcagctccaacatgtatcattgtgtgaaacccattttcttcattataacataggatagtaatggagaatcaacccgaaacacctctaaggatttattttgagtttagaagaggtaatatatttgacggggccttgtaaactgaattgtgacaataatgatgatcactactactctgttagtccattcttgcactgctgtgaagaaatacctgagactgggtaatttataaaggaaagaggtttaattgacttacagttctgtgggctgggcaggcatcaggaaacttacagtcatggtggaaggggaaacaaacacatccttcttcacatggtggcaagagagagaagtgctgagcaaaaggaggaaaagccccttataaaaccatcagatctcatgagaagtcactatcacaagaacagcatgagggtaaccacacccataattcaattacctccaaccaggtccctcccacaacacatgaggattatgggaactaaaattcaagatgagatttggtagggacacagccaaaccatatcaactactactattactactaatgattgtaagaggaggaagtttggtggtggttgctatgggttcaagcagcatacgtcagtcattcataccttgcctgccttcttatggaaagcatggaggaacagcaaggacagggactgtgaattagagtccttgagttcttgtacctgttctgccctgaatgtctcaatgactactagattcttcatccataaattacaataatgataccctacttacttcattttacaggcattaataggatgaaagcaggtcacaggaatgtctgtatatgaacattttagtgtgtaacacaaacttactgaatatttagttttgcaatgacatactctaaacttccagaactttcttctatagataaacttcatttgagtagcttctgttgcaaatcataataaaaagaagaaagaatttatggattaccatgcaaactcagagaaacaacagtatcgggtggttcagaagcagcaacttacagaactcagtgatggagtcagaactggatttaaatcccacctcttttcacataacttcaaacccacttccagctactttcctgtatttctccttctgtttagagtggagtttctccaaagcatcgcctgtactcttggtctctacttctccacttcctactccttccttgcccactgcagtttgaattctgtcaccatcagccccctgaaacgtttcatattaaggttatcagtgacctctattttgctaagtccataggatgttttttattcccctttctttagttctcagcagcatggggcatcagtgatcactttttcctccttttaacattctctttccttgactttctggaatgtcaccctgtctgttttctccctatatctctgattcctccttcctaaccacttttcttgagtttatagtccttttcttgaccattaacattaatttttgtcacagctagcttcctggccctcttctctctttgccatctcttccaagatgatctcagctatgctcttgacttcatttctgtctatattttgatgactcttttatgtccagcccagatacttagtaggtattcagtaaatgttagttcggtttccttccacttttcttttattgtcttacaaaggaaagtgcatctgtgtcttattagatctatgagtacaatattctaaaactatgggaccctttatgcttccggtcttagaaagaaacaggcatagctgtttttgaaatgaagttagctgtttggaagagtggacaaatccttctgaatcaagaaccatgtgtctcttttactatgacttggggctttctgaaaacagcaatgcaggtcacccctatctcagagcttagggtcagcaaatcctgtttgaaactgtggaaacaagtgttgataaacagattgagtattttatactcttgatttacaataatcctcttaggccccatctctgaagagaagtgttttgcaagcttataaattaagtaaacaagaactggatgtgcccgtacatgtaactggtaaccaaagtttctcttcatgtggggccaaatttgcagatatttcactctttagcagagatcaccttatgtcaatcataaattttgactcttttcctctaaacttgattctcttagaggttcttaactaacagtgtctctgaattaggttctggtgacaacagggtttagtgagaacattttggcataatccacaagtgctagattcaaggttggcagcaaagcaaaacttaaaatccagggtctgtggcccatctgtctgatgagtatcttttgagcatttgtgatacatgaatgaaccaagcaaacaaagtctttgctttcataaaaatatacacacacatacatatataaacatgcagtacatacatgcaaatatgcatactatatacatatacacatatgcatatatacagatatagccagccattgataaatgctctaaggaaaattgtagataaataaggagatatagagcattggtttcaaagcccttaatgttgtctttgttgtgctagtgcatatttttttcctcagcctttcttttttcctactttccctgaatttttctgttattcctctgaggacagctaatttttcttgatctgatttattcctcaaacttcttttgcttttgtaattcccataatcccactaaatatcaatttcttaaaattcactagtcctctatatcgcgaatcgcagatagattaaaacttcccattaaaggctgtacaaatccccctcaagcaaagaaagggaaaaaaaggacaataacatttattaagaatctgcagtatgtttggcactgtgcttagtgataatagtttcacgtatattatctcatttaattctagatgaggaaatgaggattattgggagctctcaaacttcacttctaaaaatttttctctctttccattctgctcttttgtattgagagtccccttttagcctttatgactttttaaaccttggaccgtcattctgataactggggtgttgagtctatcactgaatatttacttagccttccctgagctaggacagtcagtgtgataatattaacacctttcattcccccatggtatacaaagataatcagtaaattcttgatggctctgagttcagaaagatttcttacagaaattagctggatattattatacatttctttttttttttttttttctttttttttgagacggagtctcgcactttcacccaggctggagtgcagtggcactatctcagctcactgcaagctctgcctcccgggttcacaccattctcctgcctcagcctcctgagtagctgggactacaggcgcctgccaccgcgcccggctaattttttgtatttttagtagagacggggtttcaccgtgttagccaggatggtctcgatctcctgacctcgtggtctgcccgcctcggcctcccaaagtgctgagattacaggtgtgagccactgcgcccgacctattatacgtttctttggtttctgttttgcatgcaaataaaagaaagtgctcagggcattggggtcttctctagaagaccaagggtctgtgctgatttaggacataaatcctcttattttctacctcccaactggttaccagtagctcagcacagtgcctggtggcataggggcatgtgtagggaagtcataagatgcctgttcctttgccctgtccccatcttctgtatattccagcatgtctggaaggctgtgtccatctgaagggttttagatggtgtgggagtaataatcaaggttgcattgtagaagaaccaatcaggaaagagtacagaaagcctgattggacattcttagttgagttgtctttggacatctaagaggaggcatttgaagagtggttggatacttgacctggaactcataagaaagaaatggacaggagttaaggtcatatatttggaagtcctcagcactagatggtaactggagcaatgagaagaggttaggatcatccaagaggagataaagagtaagaaaatggtgaaagacagtagatctctggaagacgtcatatgtttaatgaacaagtgaagaaggagaaacagccaaagaggagggaggaaaatcaagagagaatagtgtttcagaaacaagagaacaaatgaggaaggagtggtcaaatgatgtaaaatgcccaaaatgattcatcggcattaacaacaaagagggtattgttcctcatggtagtaccagtttcagtagaatggagcaggcagaatgcatagtgtattgggttaagaagtaaggaactaggccggttgcagtggctcacacctataatcccagcactttgagaggctgagacgggcggatcacgaggtcaggagatcaagaccatcctggccaacatagtgaaaccccatctctactaaaaatacaaaaaatttagctgggcatggtggcacacgcctgtagtcccagctactcgggaggctgaggcaggagaatcacttgaacccaggaggcagaggttgcagtgagctgagatcacaccactgcactccagcctagtgacagagcaagactctgtctggaaaaaaagaaaaagaaaaagtaaggaactagagacaggcaatatggaagcttcttttctaagactttctcttgttggtagaaaaggcacaagtatattttgttataccatgtattctgattttttggtttaagagtatgaccaccatactctctgggcagcctgtgaacccatagaattaggtgatttatggagagggagaggacatgagagatttcagggatgttgtctgcatttaagatcacaagcaataggtccgaaaaaaaaaatcttctttgattcttggatttttaaaaaactagaaatgagtttcttatgatggcaaagaagaggaaactatttattgataaacctgtcattttatagtgctcagggctctatgtttaatcttcatagcagcctttaagtagacagtattagccccaatagcaaaaaagcaaataggctcagagagggtttgcctacctgatcatccagctggtacgtggtaaagtcactttatgattattgaaactatattttcttcatgatacccagtgggatgtggacagcaaaagtttctccttttgagacaggatatatcaacctggggttcatgagagagagggtgagcgatccacttgggatcacagttaatatgtgattccctagctagaagaaggcaggctgccatttgagaaggaactgataaaacatgcaaaatgacacaaagtcagaaccaaaaaaggcatcatgcaaggttaaaattatgtgaataatgatgtgtattagttagtttaatgtcttccaagtgcatttcattttgaatgatatactcagatagcacacatggtaaggtataattgaaaaaacatgtaggagaatggctgcattcaaagaataaacatacagctgcaaggaggttaggagtcaaaggggtaagcatatgccccatccctcagggatctcattagtgcatgagtggccatatatgtagaggctaaatgaatctcactgtttgcaaagacctgcagtaaatgagacaatgacgaatcaataataattaggcctatacgttcttattgacccagatgtctgaaaccaaatgccctgctcagagattccttgagaggcagaatgaaaagatttatagacatgcgtttccaaaaaaaaaaaaaaaaatccctttactttaagaacagtggctattctgaagtggaaagtcgcaagaattagtgcagactcttgacttctggctagaaaagatgttctcaaggcttttcttgtgaatgtgattcctgttggaccaggagcagagagagcaaagagatggaaaaccaggaggttatcatattcgtgttcgctgatacgttgttctggctgtaccttgtatggaggcttcagaggatcctttcctgaagccataatagaatcattctaaaacagggtttgtgtttttagggctttgataaataatttctgacctaagatacagaaagtccatggcttcagaatcacaaggagaagggtttaaagctggactcagacctgtctcttcacctcttgaagcatctcctctgtatgttagtggtacctccccaactgggcagtgttggaaggtctggtgtacatttagggaatggcaactggtgttaactgtagttgttaagccttttcccagtaatatcttattcctcctaataagatctaaggaagaagatttttgcagatgagaatgagctattacagcaagaagcaaataaactgctggtaggtagggcggttgggctgccctcacctccaccctagtacacatcacacgcactcacacacacacacatatacatgcattcacatttacacactcactcatgctcacacagagcagctttgcttttctatatttttacattgaatatttacatacaatttttgtttaataaaggagttctactggacgggtgtggtggctcaagcctgtaatcccagcactttgggaggccgaggtgggcagatcacgaggtcaggagattgagaccatcctggctaacacggtgaagccccgtctatactaaaaatacaaaaaaaattagccaggcgtggtggcggacgcctgtggtcccagctactcgggaggctgaggcaggagaatggcgtgaacccgggaggcggagcttgcagtgagccgagatcgcgtcactgcactccagcttggtgacagagcaagattccatctcaaagaaaaaaataaaataaaataaaaaataagtaaaggagttctactggtaaatggggaaaaaaagagaatttaaaaatcaatgctctactcattggtttgtttccctacaccaagtacaggaaacttttggcaacttcatgggatccatgggatcactcacccaatcacaaactagaactagaaatcactgagccttccttctaaaacacttttaaaatgcaaagcataaataatgccttaggtatcttagatattaacctcctttggatattgatttcctatacttttttttctgccattatacaagccatgtttttaacctttaaagagacttccaaggaccccagtgggaagtagcacagatgccaactactgcaatatccactttcttttgaaatcattggttcagaacttttagaaagcagcatcttttaagaggggaaggttgaccagctttcatctttgtgtcatgtggtgtgatttaacccggtgaggtaggtgttattaaacctattttatgagtgggaaaattggaggtcagaggttaagtcactggcccattttaccgagctaggagaggtagtatcaagatttgaactgagtagtgctctcatgcccatcatcttctctccacctcctcttcacctgaacatgtaaagaatgaaggagttggtttgactccctcattctacacatgaagaaactgagacttaaaaaggagaaaaaaaaccaggcgaggtggctcacacctgtaatcctagcactttgggaggccgagatgtgtggatcacctgaggtcaggggtttgagaccagcctggctaacatggtgaaaccccgtctctactaaaaatacaaaaattagctgggtggggaggctgaggcaggagaatcgcttgaatctgggaggcggaggttgtagtgagccgagattgcaccattgcactcccacctgggcaacaagactgaaactccatctcaaaaaaagaaaaagaaaaaacgtacacaatgtcatctggtgggtttaggttgaaaatcaggtctctaactcctgatcctaactgcatttatgacattcagtcactttacttagcaaaatcctatcctgagtctgggaacttataatttctctccatttatcaactcatcatcattattacaattaggaatactgattttaataaattattgacatatgaccagtactgtacagtttacaaaatactgcgccttcacatacataatcttctttgatcttcacaataaccctatgaggtaagttggacagggattatgatatctgtttttacagatgagaagagggtggttcagaaagtttgaataactttctcatggccatacatctactaagagtaaagccattcctggatccagtcttctgactccaaacctttctactaggatgtggcacctttcttggtgatagtacagtgtgatttgagagtacagtgggctagcttctctgaagcttttaggagcctgcttactttcctggatctggaagtacaaatggtttctttctatagaatgatttgctccctgaccctatcccccctttaaaaataaaattcacttctcttccagatgccagagtatatatgcatatttgaacagtcacctggatctgattaagaaggctcagcctgtgggtttccttactgttgatttacatgtttggccagatttccatggcaaccggtctcccttagcagatctgacactaaagggcatggtaagtaacagctagtccttgcacatgggtgaaggcaggccaaagggctacaaagtttggaagaagcaaagtgaggaaaaaggaaaagaaaaaaataaaacaggccaacagccctctggctttgtgcagatgcattgctgttgctgctccctgggatgagctgctgaaagttttcattgtttctgagccaaccttgaaagcgttaaaagcagcatttcctagttcagctactgctgcctctttgtcctgtggagtggctaaaagtcatgcctatgtaattttggcatttatatcagtttgtaaagtcaaattttccagctgcatctttaggttgcccagtaaatcagtagtaaatattaccacccatggtcttgctggccacagccacacatctgcctaggctctgagtcagggctgttcagattctacactaatatagttaggatttcagattaaactttggtataagtaaatgtaatttataacttatgttggaaaataaatcctgctcttagtgccctttagggtcacttcctctgtggatattctaggctctcctagaggggccagatgaacttggtgggagaactctcaaccaccccagttgagatataaaagtaataacatcttagacaccaggagaatcatgtttgaggtgtgatgaagcaggttaaaggtagaggaggggccaggtgaggccacaaataagaaaataagccatgaatgcaggaaccaggaaaatgtcatgaagctgagaaggtgagtgtgaggtacattaaggcagagttcagaatggaggctgtaaacaaggcaaggcttatgcaaaggaagccgcgtaacagtggagcaggcctgatggagtcaagaattcaagactcaaactactacaattttgtggttagttttattgagattgttttaaatatttttatgatgccagcaggaagacctgaaatttattttcattacctagttgacatgatcaacttctattactaaaagggagtcatggtgaaaagaaaagaaaattagacatgacaaaggttatgttgatctggagtccatgaagcatgcctacacaacaaatcatgagcttggtgtccttttttatagaggcagaagaataatgtccagagagggccatgtggcaacagaccgcaactagaaagtcatactttcagataaccaactctctctgtaaacagggggtaggggaagaacacatttcatatgggtacagaaataagtgtcttaattagagacaaatatctgaagccaaatagagctagatatttaaaatgttgaagcagttaagaagcttgaccagtgttttaaatgaccccaaaacaaagcagtgttgcatagtaaaatggtcattgctctggaggtcatttgttgctttagataaaactgacctaggagccttccctagccaatgtctgtcatacccaaattcagtacccagcatgtcaggcttcatgtctcccagtagcttttatccattttttaaaaccaatcctgacatccaagacctaagaattatcatcagaaggatattctaatacagttgacccaaatgcagaatgaaattccaaagaaatcaatggagtgttctgaagaattctcatatcatgagaataagtatgtatgcaccaaaaggaacttcttacatggggacatatgcccagttgtatctaaaaatcctgggtatgtttacttttttaaaaagttgtatgtttgttcacatacctcatatatcacttggtagttcttggcaatgattccctttataactgtccttgggttaggctgcaatggaacagttatcactccatgaatttgcatcacaacactggaaggagaagatgacctaaataagatagaaggaaagcaattctgagctaaacacttcaccccaaatctccttccttcagtccagttttggaaaacatcaaaataatgaccctgaaattcttctgttatgttatatccttttgctggaaactacgatgatgcctatctccagcactcattcagcaaatattaattgggttcctattgtatgccaggcactgccgtagatatgagtaagatgcaacaatacctaccttcatggagtatgtttaaagttgggagtgggcgagtgcttgaaaaaatgttaataggaactagcaggataattccaataaagcaagatccatgtacaatttcttcttttggcccctaaaacgtttccctggacacagagtaagtgctcagtatatgcttatttataatttataggcaacatagagataataaagaggtcatttgttgccttagataaaacaaacatatgaagaatttaataataccaaatgaattaagtggctactgacactgactatccatatcgtaagtatttaataccaatattaatttccaagtaaatgaagataaactccaattgtatcataattatgagactgtttattcatcaaacaaatacaggccctgttacagttgttgggggatataagagtagctagacacaatcccagccctcaggaatatcaccatctttgggaggcagacaaaatatataaacagggaatggaaagatagtattaagctccagatgtccttcactgtccagagctctccagatgcatggaagacgattgcccaacctggtcccagcggtcaggaaagctccagacaggaagtaacattgacactgagtgaagctgggaagggggtttgaggccaagggaatcatagtatgtgcagtattctagagggaagagagcatggcatgtgaatgtctacaattttggctccttgtatcattgtctaaccaatgatagattgcctttagcattttatcttaataataaaaaaagaaaattttctcggatttctcagagaaccactggatatctgtatattccggctttggcagcgttgcactctcccagttctctactctcccctcaggtgactcttttcttgcattgttaaacatttacccattcactgtgtttttattgaatacctgctatgtgcaggcctgtgctaaacccaggtaatacaaagaaaacagaaaagtacctatcctaagttcacataaaagtaggggaggtaattattgtacatgtgtgtatgtgtgtgtatataatcattttacagtgtgatctctgtaataatcagtgcaagctgaaggagatgctcaatacatgtctgactttgaaattgtttttatgtggcattgggctagcaaaccctgatgcagcctttttctgcttctcttgaaaatatttgtaaaaatgcaaaaaagtcatgaattcatgcaggccttaggaattaggatggtgttcaactaggaaaactagaattggtattcccaattatatgatgaatgcaacttgtttgataacatcatatatgacataagaacaaagtcatgtgtgatccactgtggaaacagtttggacctcgccaccttctgctcccttgcataaaagcacaaggttcttttaaacctgaaaacagcatagctattcctctactttactgctaatggttgggttttttgttttctttttggaaagcagccagtgagtttaaattcctagatccccccacaaccctgttcccagccactctttcagttcattccatttgaaaactgccagctcaagaatccacccaagcaggaagtgtgaattaggaggaagggtgatggcttgcattctaagcatctgttaatggggcagatgtaggaaaggccttagtagttctgtaaacttgggaggaagggtgtagtttgcactactagttctaggctcggaaagccaggcagtgctgatctacctcagtccaacaaagctacagaaaataaaaactgctgtactctgccaactggcatttagctgtagatctgaagagacaaatttaagtatacagtgagtggggataagagcaaatcacggctgtgtgcggtggctcacgcctgtaatcccagcactttgggaggccgagccagttggatcatgaggtcaggggttcgagaccagcctgaccaacatggtgaaaccccgtttctactaaaaatacaaaaattagctgggcgtggtggtggacgcctgtaatcccagctactcaggaggctgaggcaggagaattgcttgaacctggtaggcggaggttgcagtgagctgagattgtgccactgcactccagcctgggtgacaagagcgagactccgtctcaaaaaaaaaaaaaaaaaaagagcaaatcatgtgtactgtatgctgggaaatactgaacatgtgtacctgtctagttagcgtaaatgttgaaaaataatggccccttagaaaaaccattacatacggctggacgcggtggctcacacctgtaatcccaacactttgggaggccgaagcggatggatcacgaggtcaggagatcgagaccatcctggctaacatggtgaaaccctgtctctacttaaaaaagtacaaaaaaattagccgggcatggtggcgggtggctgtagtcccagctactcgggaggctgaggcaggagaatggcgagaacctggggggtggagcttgcagtgagccaagatcacgccactgcactctagcctgggtgacagagtgagactccatctcaaaaaaaaaaaaaaaaagaaaaaccattacatacaaagaaaaaaataccattgtgaacacttaaaggaaagccctcttgaaaattatttactactgaaaccaaaagaaaatgttagagaactttgtggtatattcaatggaatatttttaatttttttttaagagacaggatcttgctctttgtcactcagactggaatgcagtggtgcagtggcctaatcagaacccactgtaaccttgaacttctgagctcaagcagtccttccatctcagcctcccaagtagctaagactacacaggcacatgtcagcatgcccagctaatttttaaaatatttttttgtagagatggggtctcactctgttgccaaggctggtctcaaactgctggcctcaagccgtcttcccacttcagtctcccaaagtgttgagattataggcatgaaacactgttcccagccagaaattttgtttcaaggcatatctctatgaaataggccagaaacttattaggaaagaacaagttaagatgaaaggacaatggaatgagaaaaagggggaaatggcaaagaccacaagacaactaaaaatgcaatcaaagaattaaaacctacattgaaagcaatagggagtataattttcactgaagaaaataagatcaaggctgtcataagacataacatatgttttaaatttactctataggaaaaacattttgaggataggagcaatggcttatttactttttaaaatatcaacagttcttaggtcagaagctggcaccaaataattgccttatggtcaaacagttatttcaatcactgtttgccaaatgaggaatgaacagtgacctgcccaaagtcacaaagccaagaagtggcagcgcttgccttttaggatgcaaactctggactttgcaaaacgcatggaggactattaagaaagggagtttaaacatgcattatacatggtttcatagtgaaccatgttccttaagctagtccttggctcttctgttcttctgaccaccaaccttgtggcttgtcctcccacttttaccctaaccatggtctttggatttaaactctgaccctgtctcttctcagtaaggtactagtttccttcccaccctaactgactcagatttaaaaaaaaatagccactcgtggtttgacctggttctaatgccttccacactaggtgcctaccttggtaagtaggaacaggacataacccaggaatctcttccttatgcttgatagtatcattttctttttgttctggtaacagttgactcctatcatgtgactagctgtttcatttttcttttgatgatacaatatcagcctgaagcactggactaaagagaggtggaggaggtgggggatgagcagcctaatagcatggctggactaggtaccccactatgtaaacatttctcctttccagttgataaatgaagcacagaaaggtgagggctacacatacgattatttaaaagaagcagaatcttaagtaataacagtcggtctcaaaacagtaagcgctgatgattttaggttcattaaaaacaagacagacacgcccccccccacccaaagaaaaatgcttacttttaaagtaagaaaatgacatggtcacacataaaggtagatgaatataggccgggtgcggtggctcacgcctgtaatcccagcactttgggaggccgaggcgggtggatcacgaggtcaagagattgagaccatcctggccaacatggtgaaaccccgtctctactaaaaatacaaaaaattggctgtgcgtggtggcacacacctatggtcccagctactcaggaggctgaggcaggagagtcgcttgaacccaggaggcagaggttgccgtgggctgagatcacgccactgcattccagcctggcaagacagcgaggctccatctcaaaaaaaaaaaaagatagatgaagataaatactcaccatcaggaatagttgcatgttttagggatttttttggtggttatttttattttaaatgttttgttgaatggtttttaccactgcaaagcagtaaagagggcccaggttttgaaatcggacttatgtttgaacttgtcttgaagatataccagtgtatgacctttggcgggttaactctgtgcagctgatctgctcatgaggaagcaggagtggcccaggcttctttgcagggtcactgtcagcgccagacagtaggtgttggcacgatggacagacagcacaacaatgcccttgaattggcagctcctgcttggtggcctttacttgcatctttacgagatggccagtaggatcctgtgtggcttttgaaccctgagcagccagccgtgggcctcccactttagccccagaactgactggactcaccagcccaaacaaccagccagagaagcccaccagtcccttggtcctcacagaaagcaagtttcatacagctcttgagattgatcttctttgttcaagtccttggccctcagtttcctcatcaatacaacaggaaactcaaatgtggtgtaccttatggaatagctagcattgtaggaattttcaaagagtccttgccgtctggtatatatgagcagtttctattcacaaaaaattggcgtggcctttgttttgtggtgtttgggatttttaaaaattattttcctgaaataaccactcaaccactcaacaaagcaatgaccttggagacatatcaggccctgaaaacacaccaaatgcaccctattcatcattggttgaaacatgttttctctgcttcatgttaaaagtacagaactacccagaacaaaaagtgattttctgcttctttgaagagctgtgacttctaacatcagagcgtatgctactcaaactgctggagaggttgaatgctgctccaacaactcttcaaagcaaacacagagatagtgtgtatgtgggagaccaggagagagtcagggaggaagcactgggagatcttagccagtttccaagggactgaatcccagctagctgtaggcatcactaaacagatccagatgtggaaggagtcagcaactcagggtatctgcaagagctcaatagagagcagaggttgcacccctgtggcttttccgatagggagatggatgatagagctggaagctcatgagctaattgaagtagctttcaaatgatgtatttataagctttggaaacacatggtctctttgatatgagtttgtggatgtttttgctgttatttaacactgatttattcggactttttttttacatatttttgcttatgaaaaatcaaatcctataacaaagcttaatatcctcagtgtctttacctggttttctgattatatatatataatcacaataccaaattggtgttttccaaattggtcacaaattttactgaatatatatatatgttttactgaaaatacatattttttatttgtatatttatatataaatttacatatttatattttatttaaaatatgtattttactgaaaaaatatatatattttactgaagtgactaattcgccagctggtattgtgatttttaataggtaccatttttcaggcacctgatgcaccaggcaccatggtagatgctttccatgtatcatcaacaaccttcacaacaaccgtgcaagacaatgttgttgtcccatttaaaagaagagagaaaccgaggctcaaggagtttaagtagcttactcagaggagaaaagggtataagtggaacgggaaccagtcaattcaaacctgggtcaatgacattctttggggaaaaagaaaaataaaaaactagatctttgtcattactgttgttttcattgcttctgctttgtttttaatgtgcctggcatctttctttttcattttaatgactttttaaattctatcacagaatcagactttcctttcttactgctcctttatctttcctatatacactaaacaacaagtaaaaccagggaatggactatgggcaggagtgtttcccaaggtcatgtggcatgataaaagactgaggggcgaatcaggtggaatctactgggaaggtccaagacataaacaatgcaaaggaactaaggccagaggaccaaggatagagtccattgtgtataatcttggtgtgcagacccaagacagggttagacaacagcaagtatgggccagaagagttgtacagaccagcttcgagaaacagtatatgagcatatcaaaatggcttagacttaaaccctcagaagcaaggcaaacaaggtgtgaagggcctttgggtaaacagcaaacaaagtagtgttgtgtggtgtagaattcaccaatagagtaaggtcatgaggggcagtgtccatccatcatttttgcttgctataataaattacacaaatctagtggcttaaatttattctcttacagttcttcaggtcagaaatctaggttggttctactggttcctccgtaaccaaagaaagtgttcacaaggccaaaatcaaaggttttattggaaggttctgggaaaaatctgcttccacactcattcaagtggttgacctaatttagtcccatgcagttgtagggctgaggtccctgtttccatgttaaaggtcagccagtgatccttctcagctttcagaggcctccggcattcctgggcccaccacccctgccaccatcttttttttttttttttttttttatactttaagttttagggtacatgtgcacattgtgcaggttagttacatatgtatacatgtgccatgctggtgcgctgcacccactaactcgtcatctagcattaggtatatctcccaatgctatccctcccccctccccccaccccaccacagtccccagagtgtgatattccccttcctgtgtccatgtgatctcattgttcaattcccacctatgagtgagaatatgcggtgtttggttttttgttcttgcgatagtttactgagaatgatgatttccaatttcatccatgtccctacaaaggacatgaactcatcattttttatggctgcatagtattccatggtgtatatgtgccacattttcttaatcgagtctatcattgttggacatttgggttggttccaagtctttgctattgtgaatagtgccgcaataaacatatgtgtgcatgtgtctttataacagcatgatttatagtcatttgggtatatacccagtaatgggatggctgggtcaaatggtatttctagttctagatccctgaggaatcgccacactgacttccacaatgtttgaactagtttacagtcccaccaacagtgtaaaagtgttcctatttctccacatcctctccagcacctgttgtttcctgactttttaatgattgccattctaactggtgtgagatggtatctcattgtggttttgatttgcatttctctgatggccagtgatgatgagcattttttcatgtgttttttggctgcataaatgtcttcttttgagaagtgtctgttcatgtcctttgcccactttttgatggggttgtttgtttttttcttgtaaatttggttgagttcattgtagattctggatattagccctttgtcagatgagtaggttgcgaaaattttcacccattttgtaggttgcctgttcagtctgatggtagtttcttttgctgtgcagaagctctttagtttaattagatcccatttgtcaattttggcttttgttgccattgctttttgtgttttagacatgaagtccttgcccatgcctatgtcctgaatggtcatgcctaggttttcttctagggtttttatggttttaggtctaatgtttaaatctttaatccatcttgaattgatttttgtataaggtgtaaggaagggatccagtttcagcttcctacatatggctagccagttttcccagcaccatttattaaatagggaatcctttccccattgcttgtttttctcaggtttgtcaaagatcagatagttttaggtatgcggcattatttctgagggctctgttctgttccattggtctatatctctcttttggtaccagtaccatgctgttttggttactgtagccttgtagtatagtttgaagtcaggtagtgtgatgcctccagctttgttcttttggcttaggattgacttggcaatgcgggctcttttttggttccatatgaactttaaagtagttttttccaattctgtgaagaaagtctttggtagcttgatggggatggcattgaatctgtaaattaccttgggcagtatggccattttcacgatattgattcttcctacccatgagcatgaaatgttcttccatttgtttgtctcctcttttatttccttgagcagtggtttgtagttctccttgaagaggtccttcacatcccttgtaagttggattcctaggtattttattctctttgaagcaattgtgaatgggagttcactcatgatttggctctctgtttgtctgttgttggtgtataagaatgcttgtgatttttgtacattgattttgtatcctgagactttgctgaagttgcttatcagcttaaggagattttgggctgagacaatggggttttctagatatacaatcatgtcgtctgcaaacagggacaatttgacttcctcttttcctaattggataccctttatttccttctcttgcctaattgccctggccagaacttccaacactgtgttgaataggagtggtgagagagggcatccctgtcttgtgccagttttcaaagggaatgcttccagtttttgcccattcagtatgatattggctgtgggtttgtcatagatagctcttattattttgaaatacgtcccatcaatacctaatttcttgagagtttttagcatgaagggttgttgaattttgtcaaaggctttttctgcatctgttgagataatcatgtggtttttgtctttggctctgtttatatgctggattacatttattgatttgcgtatattgaaccagccttgatcccagggatgaagcccacttgatcatggtggataagctttttgatgtgctgctggatttggtttgccagtattgtattgaggatttttgcatcgatgttcatcagggatattggtctaaaattctcttttttttgttgtgtctctgccagggtttggtatcaggatgatgctggcctcataaaatgcgttagggaggattccgtcttttctattgattggaatagtttcagaaggaatggcaccagctcctctttgtacctctggtagaatttggctgtgaatccgtctggtcctggactttttatggttggtaagctattaattattgcctcaatttcagagcctgttattggtctattcagagattcaacttcttcctggtttagtcttgggaaggtgtatgtgtccaggaatttatccatttcttctagattttctagtatatttgcatagaggtgtttatagtattctctgatggtagtttgtatttctgtgggattggtggtgatatcccctttatcattttttattgcgtctatttgattcttctctcatttcttctttattagtcttgctagcagtctatcaattttgttgatcttttcaaaaaaccagctcctggattcactgattttttgaagggttttttgtgtctctatttccttcagttctgctctgatcttagttatttcttgccttctgctagctgttgaatgtgtttgctcttgcttctctagttcttttaattgtgatgttagggtgtcaattttggatctttcctgctttctcttgtgggcatttagtgctataaatttccctctacacactgctttgaatgtgtcccagagattctggtacgttgtgtctttgttctcgttggtttcaaagaacatctttatttctgccttcatttcgttatgtacccagtagtcattcaggagcaggttgttcagtttccatgtagctgagcagctttgagtgagattcttaatcctgagttctagtttgattgcactgtggtctgagagatagtttgttataatttctgttcttttacatttgctgaggagagctttacttccaactatgtggtcaattttggaataggtgtggtgcggtgctgaaaaaaatgtatattctgttgatttgggggtggagagttctgtagaagtctattaggtccgcttggtgcagagctgagttcaattcctgggtatccttgttgactttctgtctcgttgatctgtctaatgttgacagtggggtgttaaagtctcccattattaatgcgtgggagtctaagtctctttgtaggtcactcaggacttgctttatgaatctgggtgctcctgtattgggtgcatatatatttaggatagttagctcttcttgttgaattgatccctttaccattatgtaatggccttctttgtctcttttgatctttgttggtttaaagtctgttttatcagagactaggattgcaacccctgcctttttttgttttccatttgcttggtagatcttcctccatccttttattttgagcctatgtgtatctctgcacgtgagatgggtctcctgaatacagcacactgatggttcttgactctttatccaatttgccagtctgtgtctttcaattggagaatttagtccatttacatttaaacttaatattgttatgtgtgaatttgatcctgtcattatgatgttagctggtgattttgctcgttagttgatgcagtttcttcctagtctcgatggtctttacattttgacatgattttgcagcggctggtaccgattgttcctttccatctttagtggttccttcaggagctcttttagggcaggcctggtggtgacaaaatctctcagcatttgcttgtctgtaaagtattttatttctccttcacttatgaagcttagtttggctggatatgaaattctgggttgaaaattcttttctttaagaatgttgaatattggcccccactctcttctggcttgtagggtttctgccgagagatcagccgttagtctgatgggcttccctttgagggtaacccaacctttctctctggctgcccttaacattttttccttcatttcaactttggtgaatctgacaattatgtgtcttggagttgctcttctcgaggagtatctttgtggcattctctgtatttcctgaatctgaacgttggcctgccttgctagattggggaagttctcctggataatatcctgcagagtgttttgcaacttggttccattctccccatcactttcaggtacaccaatcagacgtagatttggtcttttcacatagtcccatatttcttggaggctttgctcatttctttttattcttttttctctaaacttcccttcttgcttcatttcattcatttcatcttccattgctgataccctttcttccagttgatcgcatcggctcctgaggcttctgcattcttcacgtagttctcgagccttggttttcagctccatcggctcctttaagcacttctctgtattggttattctagttatacattcttctaaatttttttcaaagttttcaacttctttgcctttggtttgaatgtcctcccgtagctcagagtaatttgatcatctgaagccttcttctctcagctcgtcaaagtcattctccatccagctttgttccgttgctggtgaggaactgcgttcctttggaggaggagagacgctctgcgttttagattttccagtttttctgttctgttttttccccatgtttgtggttttatctacttttggtctttgatgatggtggtgtacagatgggttttcggtgtggatgtcctttctgtttgttagttttccttctaacagacaggaccctcagctgcaggtctgttggaataccctgccgtgtgaggtgtcagtgtgctcctgctggggggtgcctcccagttaggctgctcgtgggtcagggttcagcgacccacttgaggaggcagtctgcgggttctcagatctccagctgcgtgctgggagaaccactgctctcttcaaagctgtcagacagggacatttaagtctgcagaggttactgctgtctttttgtttgtctgtgccctgcccccagaggtggagcctacagtggcaggcaggcctccttgagctgtggtggactccacccagttcgagcttttgggctgctttgtttacctaagcaagcctgggcaatggcgggcgcccctcccccagccttgctgccgccttgcagtttgatctcagactgctgtgctagcaatcagcgagattctgtgggcgtaggaccctccgagccaggtgtgggatatagtctcgtggttcgccgttttttaagccggtctgaaaagcgcaatattcgggtgggagtgacccgattttccaggtgcgtccgtcacccctttctttgactcggaaagggaactccctgaccccttgcgcttcccaggtgaggcaatgcctcgccctgcttcggcttgcgcatggtgcttgcacccactggcctgcgcccactgtctgggactccctagtgagatgaacccggtacctcagatggaaatgcggaaatcacccgtcttctgcgttgctcacgctgggagctgtagactggagctgttcctattcggccatcttggctcctcctcctgccaccatcttttaagccagcaatgatgggtcaaatctttctcatgctttgaaccactccgatttctatttctgcttcatctctcctgtcttcctcttctactgtgtcgcttgactgactcctctgcctttctcttctgcttttaagagctcctgtgattactctggatccaaccagagaatccaggataatctccctattttaacgtcatctggctattaaataattctatctgcccagttcctttaaagcagggcctcagttagtgtttaattgaataaccagggtacagaatattgaggggacatatttaggattctgcttaccacattgtggtagcacagtcatctgcatttctcaaatgtggataggatttaggcaatgccaagtgttagcctagattccagacacttactgacacctctaaatatttttggtaagatgtgtccccctttctcttccaagcgggtgattatctcagacttgtcctccaatgtcccttttccctttagaggcttcctataaatctttctctgatcctcctcattgccttgtccatcagctccaccttcattattgactgagcaagcagagcatttctgcctctccattgtgttctggaaagctttcagtgaattcccctgagccttggatacccccatcaagctctgatgaccatagaaaaatctcaggacttgtgaatcccattttcttgtcttttgtaatcttttgagatcccttgggaaactatttttaagccttttttttcttgctaatatgtataaacacttcaattcctttaacaactaggaaggaaaaagtgtaattgctaatacatttattaataatctcaactattttagaacctatgaacctataatttataataccaaggtttagagcagtcatttccacaatttattgtgcattaggactgtggtgaaatgcaaattgctggacccacaccaaaggttcagtaaatctagagtaggatcccaggaaacctacactcgactaggatcccaggaaagagttgagagaggtgccgtagtttagacagctactaagttgcaagatttaaggtgaagtccagggtggacagtaaccatctgtctcttctttttatagtgaatggaagtgtgtaggttgataagtactaaggcttcctcaaggagttcttgcaagagtccccccactctgtgtccctgggcactcaggggcttctccatactcctgcatgcctgtacctttaacattatggtcccagcgctgatgagcaacttctgccctggcttccctacactgaacagtcactagtctccagtgcccctcattaatatcctcagtagtacccacagcatggtgaaggagatacgttactcccatatcccagtaaatgaatgggattgagcctttcatgcaattcgagagaaagagaatgaacacttattaagagaaacggaaagaaaatgaatacttattttacttttgtaagtttactttacgttctgggatacatgtgaagaacgtgcaggtttgttaaataggtatacatgtgccatggtggtttgctgcacctatcaacccgtcatctaggttttcagccccacatacattaggtatttctcctaatgctctccctcccctccaccccaccccaccacaggccccagtgtgtgatgttcccctccctgtgtccatgtgttctcattgttcaactcccacttatgagtgagaacatgtggtgtttggttttctgttcctgttagtttgctgaggatgatggtttccagattcatccatgtccctgcaaaggacatgatctcattctttttttatggctgtgtagtagtccatggtgtatatgtgccacattaagaaaatgaacatttaaatgccacctctttgcacagttggcaccataagagttacaggagtatgtagctcttgtagactcagtacagcttactgaaaaaagtaattcactttgcaaatgatacctcatgtaatcctcacaaaaataatttgaggtattatccctttttttgtggatgaaaaaattgagctcatagatgttacaaaattcatatagtgtcatgcagctaaattagagaaaatgtcaatatttaaacccaggtgccttcctctaaagctcattgtttcaattggcatacaccgctaacctcgaaaatcccaatatttacataagtgctttatattcataatctaggaggttaaaattaggcaatgcagttatttgcattgttttggccattatatatagttttcatgcaccctaatattaattgtaagagctttctcttatagttctcttcattacacaatatccaaaatagataaaatgtgcttacccttgcaactctcacatcgggcttccctacacatttgtctgtctcgcccaaacattcaaaataggcacaggcacatcaataaacacactccttctactcatgcttcctctccacttcctcttgttggaaccattcagcctccagctagggaatcagttcatctggcctatcctagccttttcagccatttcaaagctgtgcctctcccaggacttctttggcactcccagggcactgtcaccacctcccttcgaagacagctccccgagggtcctttgtagcctctcaagcagtcttcatggcactccttgcaaagttccgtcatgggttgactgggctgaggtccctggtatttgagagaaaattaaatggacttaacgatcatctgcatatcagatgagatgtcaaggaaacaaggacctcagaccacagtgtctttgcacttgagagataaatatctttcactaagtcacatttcaataccatggctctagtgttagtggtgagggaatactggaaacggttgtatgagaattgtgtttgtggcttcccttttgatactgaataccttctatattatgatccatgcaagaaatctcttctagaatttcttcccaggaataattttgtctcccttcaaggatagctatgttttatttatcagaaaaaaagctatttcaccctcatgtgtccctttttgccatagctgctagcaagctcaggatttaaatttagtgctcaattacattgattatatcattctcagtttctggggaaaaaaattatcctcccgtttctgctctatgatttctgagctctggaggcactggaaatttagagaagggtccgtgatatctttttgcatgaataccaatgctttttggaaattctcgtggatatctgctggggattaaggaagttaaatccagctatgtcacaccctttcttctctcttatggattcttactaattgagaaggatatcagaacccattacattatcagtattattatacaaagcactggggttcctaataaatattgttaggggaatgcatcttatatacaaagtcatattttacccccactcccaacaaaaatcatccaaatctggtcttcaggagtgggtcagccacacagaggatcatggcttaatcctcttcccattgatgaccagagagaggaagccaaagggaggcagcctcctggacaggctctagaacagtgcactaagccatggcccagcaacttccctaggagacctaatagcagaggtgctgttgaggccaggccagtacaggagagacagagaaaccgtgtgtgaatggtgttcatgactagtgatcattgccaggaccaccgcatgctagcatggtgcaggcagctcgcagaaagtgttcagctcagggatgttcagctcatgactggtgttcatgactagtgatcattgccaggaccactgcatgccagcatggtgcaggcagctcacagaaagtgttccactcagggggctatgaccaggctgaaatcctgcttactctgcacctttttataattcatactcccagatggggtgcctttttcaaactcaagacaaaggctctatatgaggtacagggacccttccttttaccctattctcataaaagccacttctctgatgagaaagggtaagtttagggatggtggagggcaggtggcaacatggagcaagtaactaaaagtgttcttccagtgttcttttctcttggggcatggtctcctcctctctgattgtgtgaggagctgaggcagtaaactttgtccacctgtacttgtagaatttaacaaagaaggataggacataaggagagaaagtggtgtctaaaaggtgaaaagaagcattgaattgtcactggttcatagttcacagtgctgagtgaattgtcactcagcaaatattaactgagtgcttactatgttccaggcacagcactggacattagagctttggtgagtaagacgagcaaagaccatcagaacacctacattctggtgtccattctctgtgttcccttaggcacattatttcctcactgtgaaataaagttccataatgtcagcattgttcatgttctctctgagttccagaattcttaccatatgcttaggtctctgggaaactttgtgaaggatgttctttcacagttaatggcttaggatgattcagcgccagagttcttctcgtgtctctcatttaaattttccatcttcttgtgtattaaaaaatcaaagccatcattctaatctgattgcccaattatttgccaagaaaaactgtcagcaggtagctctactgaatgtaggaatccccgcatcaacagacttagataaataattcagcatagctggagcataggatacagagtgaggagggacaagagtaaacactggagaagaagcaagggcgagcccaggaagaagcacatgagacagtgaacgcatttctactgtgaaatgagggcaatggggagaacgttttacagggagtaacacgatcagatttgcatttaagaacagtcgatctagctctagtatggaaaggagcacaattagaaacagtgagatttgctcagggcctctgtcagcaattaggaaggacataatggtggcttgaattaaggaagtgaatgacagtaaggatcaagaaaaggagatgcattcaaaagagatttgggagatcaaatgtacaaaactttgagactgcttaaatatgggaagacaggggaggtcaagaaagatggcttctggccaggcgcagtggttcacaactgtaatcccagcactttgggaagccaaggcaggtgtatcatatgaggtcaggagtttgagaccagcctggctactaaaaatacaaaaaaattagccagatgtggtggtatacatctgtaattccagctactggggaggctgaggcagcagaactgcttgaacccaggaggtggaggttgcagtgagccaagatcacaccactgcactccagcctgggagacaaagcaagactctgtctcaaaaaaaagagggttcccaagtttcctggtttgggtaactgaatggtgcctgtgcactgtcataagccaattgcagtggggttcagggtgaaatctggagagagtaattaaatggggccagagaatatgaaggaagggacctaggtagaccactcagctcccttattttgatgcaaaccgcatgtccatacctggttgagctcaggacaacacacaccataggaactgagtaaatgaatgttggtgaattaattttataatgtgataatctaaagtgaactatggtgctgatgcccacaaaagttgggctcggcttgaagaacccagcagccctcaccctttagaaatgtcccaagagaacaccttgatgagtgggagacatgaaagcaggactgtgagcaagtcctgatggcatacaaatccggcatcctgttcagttctggactctctcagagattgacatactccatataaacatccgattctgattgactttaatgggatccccttgcaacccacagattctaagttatcccctagtaggtataatatttgtaggagacatattatattaccctggattggacactgaatgctgttacactgaagtctgacagtagcagaactcaaaacaagatcatcttgtactagaatgccactgttagtgttgatttcttgtaagccacagaaaataggtatttgtaagaaaagaaaatgttttaaaataaaaagtatttaattatcgtctaagaaatatcaaacataatcttcctgtggtatttgttttgtttttgtttaaggtcagggtattttctcttggggaggaagggatagtttttcccaggtctggagattaaacaacttaataggcatttcacgttccgctcacaaaaaggggatttgcatatgaacttgtttcggcaagaaaacacatctgaacgtatttcatgggaactatctttatccacggcagcttcttttgaccatcttcttcttttcttcccttcatgcctgcaggtcaccggattgaaactgtctcaggaccttgatgatcttgccattctctacctggccacagttcaagccattgctgtaagatactgtaatgccatttttaaagagacttagagccatcagtatactctaggccactggctccccaagatacagcacatgcttttgtgacagagattcttaattaaaagattgtttgcaaaaaagagattcttgtatgtctggaaggaagtgttgatgaaaggcctcacctgctttaactaataacctcacataacaaaaagctgaaaggagttaaaatctgtgaagattatacttgtcatttatctaatttgtcttctaaatttaattaaatagaagcaagcaaacagatgctatgtatgcttgcattaagaaaagttgttaagaatgtctgatttataaaatacattatattgttcactttgcaaaaggattcatgataggggtcctttaaatagtaagcttccttagaacatgaaagtgtttgtttttagataattagctgcttaagtgaggttaggatgattagggaggaagaggggaatttaaatctgaaatgttaggagtttctacactaaagataaatcaaaaatggaaatgaaatcctaaaagcttaaccattgtctaaagaatcttcttatctagaggtggctatggatgggctacaagagggttctaatcctgaaatcacatccagaaggttgtgtgtgtgcatatattacaaagtgcattttaggagagtagatcatggtgttcggggtctcacagcaggtatgtaaccgaaattaagttaatccagtgaggcttagccacttctgaaaagagaataggaattaacagaaaggaaaaatcagtttatctaattttaattcaaaatttatttttcagtaacacctgttttaagcaaatatgtttaatgctatacgtacatatatgatattcaattattctgtttcttcacacaactgttttcataactttattcctttaaactatatgtatatttattcacaccaccaacagaagtgcttttttaatgctcagatttgtccatgcaccatgtatgtgcaataaagaatggaacctcccagatagtaataatactaatactgaagggatataacttctttaatgcaactacatagaagtatggaatcagtcaacttgattaaacagcccttttagattctacactagttttactatatcttcctgaagcaattttcttattggtcttaatagcttggccaattcagtgaaatcagtcaaatatctttatgcatggaaacttggtcaaaagcacacaattctgacatctgtaaaaatgtaggaaatgaacagtaagatgaaaatagagaaaaaaagtgtgcatcagtagtaaagataattatttagctgtcctgttttataataataatgatgattatgatgataataatgagtgaattaagagggtgttttgtttttgtttttgtttttgtttttgtttttgtttttgttttgagacagagtctcgctctgttgccaggctggagtagagtggagcgatcttggctcactgcaagctccacctcctgggttcaagcgattcttctgcctcagcctcccgagtagcttggactacaggcgcatgccaccatgcccagctgattttttgtatttttagtagagatggggtttcaccatgttggccaggatagtctggatctcctgacctgatgatccacccgtctcggcctcccaaagtgctgggattacaggcatgagccaccgcacctggccgagttaagaggtattttataggccaggcgcggtgactcaacgcctgtaatcccagcactttgggaggccaaagagggcagatcacgaggtcaggagatcgagactatcccggctaacatggtgaaaccctgtctctactaaaaatacaaaaattagccaggcatggtggcgggcacctgtagtcccagctactcaggaggctgaggcaggagaatggcatgaacccgggaggcggagcttgcagtgaactgagatcgcgccactgcactccagcctgggtcacagagcgagactccatctcaaaaaaaaaaaaaaaagagagagattttatatgtgccaagcactgtgctagatacattacacacacctgatttaaccttactacgtagatattataattcctattccacaaactagaaacctaaggctctgtgtgattaattaacttgtgcagggccatatagcttgtggcagaggtgggatttgaacccccagcattctaaaacaaaattagacatgtgaagtacagtcatctgctacataacgttttggttaacgagggacttcctatatgatggtggtcctataagattatgatactgtatgtttactgtaccttttctatgtttagatatgttcagatacacaaatatttaccattgtggtacagttgcctacagtattcagtacaataccatgccgtataagtttgtagcccaggtgcaataggccatactatatatagcctaggtatgtagtaggctataccatctaggtttgtggaagtacactctatgatgtttgcatgacaaaatcacctaacaatgcatttctcacaatgtattcccatggttaaaggacatttgactgtattgaggaacttttattttcagatttgttaatgttattgtataaaagagtcatagaatgaatagcttatattgaaatgaataatcttggaaaatcagagtggtgtgatattcccccttttgagcacatgctaagaggaggacatgaaggatgaggcaaacaggagggaccaaggggcaccatcacatagtggtaatgacagttacctttcgtcagacacgactgtgtgccaggcaccaaagacggtgccttgcctactggtagcttaacactgtaaccctgtaagtaggtgggtttgttctcattttacagacaaggggaggaccatttgccgaggtcaaacagctagagtatggtagttggaatctgaacctttctccatctcactcccaggcttctgctctttccactttaccatgctgcattttcctttgatctgtttgtaaaagctacatgggtgaaataagctttcagatattcctaagaatcgtttttacttaatatatattagaaaatatcattaatttggccaggattgtctcacagaggttcctttcctggtaagagtactgcagcagaagtccagaaatgtataaatgaggttaaacttaatgcgggcaggagaggggaagaaaaaaagccagctacattttctcaagtaccacacacttggaaaatcaatcttgtatttaatgggccgtacatgtattaaaagctatcatatttattctgtccattgtcttaatgacctttataataccatgaaaggaaggcattttaagacagagatttttttcaataagccttttttgtggagtcaagtgaattgtgaggggttcagtctgttttgcaaatgtatctggatgtgctgatcttttaggcaaaaaaatgtgcattttaatgaggtattctgataacagatattttcccataatgttcaacttgggaaaaaaaaatgttgtttcattagccctgaatattgccggagcacttatttgttgtcggtcaactgaaagttaagcaaatttctctctatatatagtcatatctttgggtgctgttttgtaggggtgaaatgaaattaaagaggattgtaatcaagttaacttgggactgtgcaaaaccctccatgaagtaaaattctctcttgatcatgcttaattgaaagacctgtcaaccacccggtttatccatagcctgttcatctatagttttctttgcagaacagacccttaaaaggtactatttgcatttgaagtctcttgatttgcattcggttctgtacattcccagtggaatagcctaattttaatttaaatttctctgtgaaaacattttttccagaaaggtgagcacaaaatcattttcacacaaagccctttggtggggcatttcagtagggtggagtattacacagattggagtctgggacaccgaaagggaaggtcctctaaggaaccgccagactgagtgggaaattccagccgacaataccacatgggggagagacaggctgtctgtcacagcccctctcgagggagtgcctctcattcggatcatttctttccttttcccaggaaatgtgctttgttttattcttgtctcaggcctgctaatcgcaagcccctaggtccctggttttagaaatatcaaagataccagtttttcctgacatttccatacaaattaggagacagcaattctcccattccatacagactgtattgcttagtcaaattatatatctcctaagtggagaaaacaatatgcaggtttcacatttgccttaagattagagatgctattaaagtgcatagcagagtgcctagcatatagttgataaccagaagaactctccttgtatgcacctttcgtgagctggacacttctacaagttttacctttgctgcctacagcagcagacttgtatggtaggtattactagatttcatcaagcctaagaccacatttttaatttttttgcatgttgacatttctgacaatctatagaatttttaactaaatgaatatgatactattattcccatggcaaaaaaaaaaatggcaattgagttatagaaaggttaaggtacaagaaatatgtgaaatgcctaaatgccagcctgggttttttgaattcaaaactcatgctcttagctactacaattcatgccgttagagcagactggggttgcccagaatccacaggcatcaaatgatccatgatggacttcaggcatctgtagacctcctgaaattatttatagtactattttgtatgtgactttttttttctggggaggtcagtaggttttggcatattctcaagggggttcatgaccccccaaaaagcttaacaaagaacatctgggaataatcagccctagttagtatgtaggatctggccttatatggcacaacatgtttgaatttttttaaacacactacatctgtagattgtttatggaggcccaggttttacctaatccatatttttaccagattcatgaatagcttcaacaaaccctcaagacctctgggctagaactgctgtgccttttgctcctgaactgcccctgtccctcatgatttatgccaaaccaattaggatttcatgtcctatggttcccagatcaccctctgaccactcctgtccccaggttcccccatcccctggggtgacagctccccagacagccttgtcaaaggaggctccatttgccctctacccccaacccccctaagacgtgaggtcagggcagcatcctgctgacttccaaaaccctgttccttttttttttttgagatggagtgttgctctattgcccaggctggagtgcaatggtgtgatctcggctcactgcaagctccacctcccaggttcacaccattctcctgcctcagcctcccaagtagcttgcactacaggtgcccgtcaccacgcccagctatttttttgtatttttagtagagatggggtttcaccatattagccaggatggtcccgatctcctgacctcatgatccgcccgccttggcctcccaaagtgctgggattacaggcgtgagccaccgcgcccggcccaaaaccctattccttaccttggctaaactccgattcttcttgccctcagctaaaacacctcctctccctcactacattcctaggtttcaacctgaacaatactgtcacactttcactaaaaaccaagatattggctcatgccttcttcttggtggctgtgccatctgtggagacacattgtcctcccagatccttgactttcttatctcttctgacttctcttccctcctttttagcaattcactcccaggtctacacttaggactgtgacatctccccagattgctcaatctctaaacatttcaaagacttgctacccaccaaaaaatcctcttcctctattttttctggagcccctttctcaaacatcaccatgtggctgcccccttatggccacatcacagttcatctttttgtttttagtccttatcccaaataaattttgattttcgaactctagtttttgaactttcaagtaaattaagatttttcagatgttcaactatcctatctaaaactgaagaattctacattgagattcacttccataactctaaggcaataatggtttttactgagtttaatgaacttagcaagacagacatgaggataatgcatattaggaagatattaatgcacaagaactgagacacaaggctgaattgaaaatatggtgaagccctgaaacaaccagggaatggatttggctcagaagtctccttttagagaaccactacctggtttcaggcaatagcagcggtaattttagcccttagccaccctgaagccttggatctcaccttctttatgcagttagagccctctttccatgattctgctgctggattttttggtgctttttctaaggaaaaagcctttagttcccatttagtaaaggaagactgaccaagataccattgactctgtttcagagtactattgcaatcactgctaatacagggcctgggctatagtagacactcattaaatatctgtttgaatgaactatgttaccattaactgtgttgacattgtcaactgtttttgtcagtgttgtgtaactactgatagaagcaaatggtgtaattaagagggttttggaatcagtcaggcccaacttgaaattcccactctgcgatttaagtaactgtgtgatcatagacaacataatctctgtgagtctcagctttctgagatagtgtatgtagagcttagtacagtgtctagcactgagtagacatttaagaagtgttccctagtgtttacttttgtgactatactgatgctatcttctgcttttcctttcaagttggggactcgcttcattatagaagccatggaggcagcagggcactcaatcagtactcttttcctatgtggaggcctcagcaagaatcccctttttgtgcaaatgcatgcggacattactggtaagtctgggaaagaggagagaaggtcactttttggcttggcagcaaatgggcatggccaagttctgggtgaagtgagaataggaggatatatgcggtatgccagattattagaataatcctgaagtctttatattcacaatggagaaagtgacttctatgacgtctttatatgcatgatggagaaagtgatttctgtgtatatccaaccattgaataatggtgagaaataacacgagagaagttggccaggactagatcttaattcaagcatttacacaacagttttgaatacctcttctgatccacacattgtggagaatattgaagatacgaagatgaataggacatgatccttgctccccaccacccaggaactcacagtctattgaggaagggagacagcaaacaggcatattaaagatagtatggcaaaagcttggcgtgagaaaagtacggggtatcatggaaacatagtggggcaccttgtctggtttgggacctaatggcagctcagggcgtgtggtctggaagaagtgataagaaagctgtcttgaagaaagaatgcagaggctggatgctataggatctgtgggtatgattgcagactgggaatttgagccctaagaccctgagatcctgtgattccttctcagctcatcagaatcagggatcataatagagatgcagggaatcacaaataatgggctgagctctttgtgatatcagcagacagtgggggagaaggatccttagcaagcccctaggacccaaggaaggggccccattggcaggaggctttctgttgtcgcagagagtggcctggacctctgtctctctggacctgataccctcaccccttttactccttgcccctctagtgtctcctggggactggagacccattctctcccaggacccatcactgggtggccaggtaccaccagggcagggcaaggggagggaaagtggggaagggttgtacccatcccatagtcccaactccagcctgataagagcccacttgaccctacctccatttatcattatcctttgctgtccctcatcccctactttcttacctctgacttctggccaggtcaaagtccctgccccattatatcctccatccccctctaagccacacagattcctgcagatgagagccttgtctaacacgatggacgtaactgatctttgcacatcatgagatgaaactaagtaagtcacttattcccagcttagagataagcagactgagacacaagtctgaggacagtaagaaaagcatacagtcagccgggcacggtggctcacgcctgtgatccccacactttgggaggccgaggtgggcggatcacctgaggtcaggagttcgagaccagcctgaccaatatggagaaaccccatctctactaaaaatacaaaaaaaaaaaaattagccaggcgtggtggcgcatgcctgtaatcccagctactggggaggctgaggcaggagaattgcttgaacctgggaggcggaggttgcagtgagccgagattgcgccattgcactccagcctgggcaacaagagcaaaactccatctcaaaaaaaaaaaaaaaaaaaaagcatacagtctaagggcagaactattgggatgtgaagtatagaaagtattaccattaaccaagcacctactatgtgtcagtgtgaatcacgctgtagacacttaatcctcccataccaccaaaggtagaaatcggtgcccccatcttacagacaagcaagttgatgggtgggtaggtgaattaaattggctatctaaagtcaaacagccagtatggggcaggaccaatattgtaactgtggtgtgtcggggcccaccgtccctttgtactgtactgctgacccaggtttcttgacttttctgccaagtttgtaaccagttgatgatgacgccactttcctgagatgtccaaaaccctatagaagtgggccgttcaaagcagaaggaggaaagacataaaaagagcccagattgccttataattgtcctcaggagaaaaaccataacattttatctaaaaatcagctggctagttcagataacattcaagcttaaaatttgatctgtgacattccaatttctagacttctttttttttttttttttttttttttgtattttttggtagagacagggtttcaccatgttggccaggctggtcttgaactcctgacctcaagtgatccacccgccttggcctcccaaagttctgggattacaggcatgagccaccgcacccggccccaatttccagccttctgatagccaaaaaacttcctatctggatgcaagaggaaagatgaaagtcagctttggagaacacagtactctagaaaatgggaaacagggcctcccagagcagaacagctagctgtgagtgaccccggcactgactccgcgctgcagccctggactttgtgaaaatgggtcatcttccaggccctacatccctgggctgactcagaagcacggcggggagtgcagcggcttcacagaaagttctgctttggaaactgttctcctctaggctgttgaatgaaaaggctgttaatcgttatttggattccgattgaaactggaccttttgtctctaactatggaccagttacagttccagacaaagagaccttttatttagcctggaattcctctgcctttggaagcctgtgactgacaagtgatggcaaagtgcatctgcctttgaatgctttgggttctgctaaactcattaatgcatcagataaaatagttcacattccagccaaagctgccctcttcctctccttcacccaggactcagagaaaagaacacatttgcatttgtccctgtaaaaggcacgtacacaagcagccagtatagaggtagtgtcattggtgcctttaaacattgtattgctctagttttcctacaaagacagttagggaggactgtagacctggaacatgattctcagaaatgcatgtgaaaaacacattcgaatttgggagatttttttggagatagtgtggaacagtggaaaaagcagatcagctctgtgactttgggcaagttactttacctctctgagcctcagttccctcttctgaaacaaacaaaccaaaaaacattatcatctccctcatgtagatcactgctgaggaataaatgcttgcgagtttgtgagcatcaaactctgtgcctagtccaagtaggtgatcagtaaatgtcaattctcttattccatctaggaagccccatgccaaaaagaaagaggggcatttgagggaaaaaaaaaagcagcttattattttgaaagtgaatctttgccatgttgagaacagcctgctctgtacaagcagggagagcggggccttgccagcttgggaaatgctgtctacatgaggaggaagaacctccttgtaccctggtcatttggttaactgtggtttcaagaaatacttggtatgtactaagtaattgttaagtttcccccactgacttgggactaaatgttccttcttctaagttttattttttagtactggtagtttcagtaggggtttccctcttctggtcttactcattattttaattatttgttctttcatttattcactcaaaagcattctctgtgcacaccagtgtgccaagccctgaggttggcacagggatgctaagaagaacagtaatgtccagccaagaggttctttataaaacacagaaaaagtgcccttggtcttatgaccaatatccagagtgagtagagtggggacccagaggacaaaatgtgtcggtgtcagtcaggtccaggcagggaacagatacacactccagttaggttaaccggagggaagttgaatagtcagtgtacagagctgtgggcagggtgctggaagcccagacaaccaagaagtaccttgggatactaacagtgtttccacccctgggctcacaagggtgagggtagggagcaggcaatctgagcctggtgggatgtgtgaagagggcagcccagcagaagcttagccaaggatgaaaccagagggcaggggcccacagctgtgatccccactggccagtctcccaggctcagagtaggtggagggaggaagggaagaggtgggattggtcttagaggcaaatggaagcagtggattgatttcaccctgggtaacaggtgtgaggagagacttcagaagtaaggtaaactttaagaataacaactaatgctaatttagtgctttctctaagccaagcaccattttaagagccttattataatagcagttttaattctcacagcaactctatgagataggcggaattttaaccccatttttcagatgagaaagctgaggcacggaaagattaggtatcttgcctaggatcacacagctaagtcagtggggaagccaggattcaaaccctggcagtctgggttcagagcactttgggcagcaacttgagagctgataggggattcaccaggttcactcacatctctggttcgcaaggggaggggcctgtgagtagttcctccctgctcacaactcagggagcttttggcagggtaggaaggcccgggaagtgaatggtgtttggaggcactgtcttcaaaaacgtcccaggtccatagagaaggcttgatggtcatagtcgcacacccatctgtatcattcctaggattcttcaacggcttgcagtgctctctcctgctggtgtcagcacagccctgtagtgtggcctggcatctgtccttcccctctggatggttgatgggaacctttattgtcccttccccacttatccagtttttagtccaggtctagtacatgcatagaggcttcacttgccatctacctgaattctaacagtagcagccatcatttctccagggcttactgtaggccaggaaatatgctaagcaccaagtgtgtgccctctcattaagcctcacaacacacctgtgtggtacatcttatcatcatccccattttacatttgggatgatccccatttgcatttgggaaccaaggcttaaagagtgtaagtgacttactggacacagagctagtggaaccaggaaataaactcaggtctgagcttctcccagcattcccaccccacctgacaccatgttggcaatgtcttaagtcctggcccagttgagagctggtattcctaaattctctggggtgtctgtgggaatttactcccctgccctttttctctgggtagctggaggaaagaattgagtggggaagtaatgggatgtagagagagtgtcttctcagacaagataggaaaagaaatctaggctttgggaaaataactcttatggcttgagtagaagacagtttttacaccacaagtttacctctgtaaagtttgctgccatctcccgattagcagactaatctatacattatagacctaagaatcctaaattatttctgttaatcttaaacctaccatgaaccctcaacctctgggcattggcatatggagggctcctccctgcctggtggactcctgctcacccttcagatgcctgtttaagcctcatctccaccgtaatctgtgatgaccgctaccccagaaatgtaagtgactcatcattcagtcacttaccatgtgctagatactggtctaaatgccagggattccgcagtagtcaaaacagagtccctaccctcaagtagcttaagtttttggaggggagacagacattaaacaagataagtaagtaaaatacaatgttggaaggtgggatgaagcagttaagggggtaaggagtgttgagggaagttgtaattttaaatctgatggccagggaaagctcagtaggaaggtgatgtttgcggaaacacttgaaggatgggccggcaattagcatgtgggcatctaggaggaagtgttccagacagggaacagcatgggtaagggccccgaggcacactcaggaagcagcaaggaggccaggactacgtggctggaaggagaagaggaggatatcagagagggagaagtggggccagatctgggagggagagccccttgtcagccactgtaagggctgtggcatgcaccctgagagaggggagaagcccctggagggatgaatcacaccctctcttgctatctcctttcccttagcacatctcagttagagaaccaaccccctccgtagccttcatctctctcatccatttccctctgaaacctgaatagcagggcacagtccgattcatctcagtattccctcggccagcagagcgcttaataaacatcagtggatctgaacttgaatcaaatggcaggtagcagcttgcagaagcctgaaaaacctgggcactgaggtctcgtgagttgatatatatggtgttggttcccttgggctcttggctactgcaccagcaggcacaggcagtgaaatcttttagaaccaaataatcccaaggaataaagaagggaggactgcagggagtcgggcggggggcctgctgctgccctgatgtcaggtgtttttgccactgcggctgcttgttggctcctcacactcccctggctctgctccctaaccaaggtgtggccttgtcctgcgcaggcatgcctgtggtcctgtcgcaagaggtggagtccgttcttgtgggtgctgctgttctgggtgcctgtgcctcaggggatttcgcttctgtacaggtatgtgaagaccagggggtgggctgtggctcctcccctgtctgaggccatccttcctcttgacagcagctcgcattttacaaaatacacacaggatataattaagaaatgataggttccagccagggaaagcacaaacacttctagcctcagacatatttattgcagttttcatttgacttggcctcggttcgtgttggtcgttctgtttttcagttgttttttttctttcttctttaaaataccttttaaattattccttttaaatttccccttgaccacttttctttgagcacatgaaacaggtaaggctcaaaacttcagtgtttcatgtgtatttcagatttttatttgcttatgtcaacctcaccattttctaaataccttgaaggcctctatcaacaagagacacaaatgaaactgtcagtatgaaataaaaaaggaattaaaagggaaaataaggaacaaagatataggaagaaggaaacaatttggtggctgtgattaaacacataatttggctcagagcttcctggcaggcaagacaaaaaagaacacatgataaattgcataattcttactttcaaaaagaggaaacatactagtttctggtgagagggaaaacttttcctcccaccaaattgcgaaagaccttgcacacatggggctttgtggagaggttttgagtgctaaaataatacaaggtaaacaatgaatgtggtatggaagctaagagcatacaggctctggcattagaccacctgggctcaaatcctagcttgattacctaccagctcttgtggcctaaacagtcttctctgtacttccactcctttatctgtaatagtaattgacagcgcatcgtgagttctgtgtgtcaagcatgctcatttagtccctgcaatagctctattatccccattttatagttgaggaacctgaggcataaagaagttaaataacttggcctaaatgaaacagctagtaaatgccagaatcaagaagtctggctcccacttctcaactgaacgttcaagagatatttgttcagcaaagcagcagagtccaaatgacttgcccatggtctcaagcttaggactacaagccaggtatctagtagctcagtaattagagctttgtttattgtgaacctcttatgttccagacactatgctaggtgctttttgtataatcttcctaatacctataacaatgcttcatgagccacagagattgggccatagagatccaaaatttaagggtacactattgggaacagacagatgtaaaagtgtgatgctgtttgtactgcattttggaaaatgtggtacactacacactatccaagcctctgaaactaatgactgtgaaatctccctcacaaggaattaaatccactcatgaattcttgtggattctgagtgagtctttaaacaaaggtggtatagttcagttctcgactttttctggatagtctcgtcctttctcaaaaatagcacatggagatatttgttgttgaaatatcaatgaattgtcaattattattttagtgtatcagctgacggagatgttctcacaattaaatatcttgcccttcctgcggcaaattataatagttaaaacaggggggatgcttactaaggttctgcagaggttaccctgtgttgtgaactgaatatttgtattcctgcaaaatttgccctgaccctcaatgtgatggtatatggaggtgggtctttgggagctaattagggttagatgaaatcatgagggcaggagcctagtctgatgggttatgatggtctgatgggcccttatacaaagacaccagagagctggcttgttctctctgccatgtgaggacacagcaagaagtccatttctataggccaaaagagggctcccacgagaccctgacattgctggcaccctgatctcagactttgagcctccagaactgtgagaacatagatttctgttgtttacccagtctatggcattttgttatagtagcctgagataagacacctcatttaatcttgacagtcatcctgcttgcaggatgcgtgtttttatccttctgtgataggaagccaagcttcagagatgttttaagtaatttgtccaaggctacacagaaagggcagaagcagaattgaaatgaaggtctctctgggtctatatcttatcctgtcattctttttctaatttgttcgatttgttttttctttaaaaatattttctggcttcttaagtgttcagtggtgtattttctgaaaagaaatgccataggtcacaaatcaggagatagtctgtagctcaaacagagaatagcctttcaagatgaggctgctatactagatacatcataccatgactcatggcttcattgatatcttattcaaaactgggatctccagctccaaaggaattccactcacatcttcccctaatgggaaactgagcttaattccacactgacatcttgactacatgagatttgctgttagtcttctgtaacagaatctaagatatagtagatcagatttggaactgatgacttgagtagcagctgcaaggctcacagcattgtaaagacaagctcatgtctcctattcaacccaaggatgtgtgtgcctgtcctgatcgttttcaggagacacaatctagtaaagggagccaccagctgagagagtcctgaggtcttatctgtcatcacttacctgacagactccccatagtctggagctctgtgcttgctttactgtcctcagacgatgtcacttgttctctctgggtgcttgttttatttgtctgttttatgtattttttttaatgtttaaataagaattgccacccatatgggactatcgagataaagagcctttgaaagttccagtgacctctcaggtgtaatcaatatcattagaatgataaaatatttggaactgctttggaaatgaaaatgcatgtagacttggcgtcatttgctcccctccaaagaagaggggccaacctttgtgccccaggtctgaggaccagcttcagattctggcaaggtgaggcaaaattgaattgctttctttctgtgattcatattttcaacctgaacttcaacacagtcttttctttgaacttcagggaccctggcttggtttgcagggtacctgccttcccctccttaagaaagttgagcaattcctgccagcacctcaactattccagcaagtcagatgttttatcttctcatggaccacacatctggtggttagatggaggatttcacttcttatctagataggccaattttggtagactcaaccagagtcacctccttcagatgctgggaaggctgggaagaatccagaggacccagacagtagaggtaggaaaaacttttatgtgcttgaggagacagggttttcataggcccctgaatggatgattttcagccgggggtagagtcctatacctttcttgggtgataccaatggatccacagctgtagattttacttgtagcttttgtagactctgtgtatctcaattctgggagaattttatcaggggaagggagactggatggaatattctggtgggcccttaatgaaagattggccaacaacaagatctattgatattgcaaattttgaaacatgctgacaattcctagcttccttcttttgttcttttatccattcagattctccttctcttagtttgtctctgtctctcttcccttgtcctttcctgctctctctctccctttagacatctaaagtcttcttactatttctttgtcaaattcggatctcacaaaggatactgacatagccattcgttcattctaaagaatacaatgactaatactatcttaaagagttgcccctctttagaaagggtgttttccttttagtagttttcaaaactgtgtctttactaaagagaacagtctccttgtggacaagtattcttgaaggcaaatcatgatcagctttatatctgcggtttaatgaaaaatatggaatcaagccacagatatgctgctctcacagtaaaaatttagctattgaataagtgggaggggacacaaagaaggcagttcacttcccctccctttactcttaggaatgtggaatccctgcagtcttgacctctgtgacctttctacttgatccctcccccatcatcagtagagtacaaaatgatcctctgtaattctgaatatcttggaaaacaaataattataattagaagctgagagtgttccataacacttctctaggctcccaggtcctggaaaatcaataaactggaaaaaaactaagtttatgaaatatcactatgcttacactttctaagcacagacagttaaaagattctaagaaatacaaggacaaataaataaaacaagaagcagtttcaagtcgttgtgagagaaaactcaatcaaatggcaaagagacagcaacatgaaatggctctccactttctgtttccttcaggccccctgcagatgtcattagctttctgtaatttcttatcttcaggggcagtttttattcaagtctatttagacaaaacaagctttaattccagcagtgctatttgtcttgaaccaccaccccccacccttgaaaaaaaggagtggaggaagcatctgaagcaaaaatcagtaaaaggagacagtgacaagagatcaaaatgcattcagcagtcattttaaggggagtaccagtgtaaagaaaataagcccttggaatcagccaattaatcacagaccttccttcctcccactgtgtgagtgttgccacccctgtaaaccactgactccatgcactctcaccatcaactttccctgtcacgttccagacagactcctgtgtcttcaagaccaatacatgtaagtggccagttgagagctgtgattactcaccctttctgtaatgtgtgcccacaagataaaccatccatgctgaccgcagtggtctacccttgaggtcattccttgcaaacatcctcattgcttagctgaaacctctacttctgttctttttcatgaaattcacttcatttagggccagttatactcatcacctgttatgcatttcagagcctatgatttttgtatataacatgtctcccattctattttattttgtaagagtcaactttctgtgatttttttttttagctctatttggctttctgtcacgataaataacagttttgctatttgcaaaataaagctgattatcattattttagtttccagaggttagaaaaaactgaaataccgtagatgttcagaagtatgaaaccatcccatttctcggtgcattcaatttagtttacttgcatttttttctttgtctggaatactaacatttcatgttcattggggacaaaaataagaaaatttaattaagatgagtgaaaatatgaaaacattgatcttgttatcctaaaataacctattttaaattatttacttattaactatttaatattatggtttctattctcttagtctttttgtacatattttaaaatcattttatacttttaaattacaaaatgtattatacaatgcataaagttttatctttttagacctttttcctatactcaaaaatatgtagtaaacttctttatttatcatttttgtaggctgcataattttctacctaatagaatatattatagcttatttcaccagtcctccagacttgaatatttaggttttctccattgttttaaagaatgctgcaactgacatctctgttactaaatgtttgcacacatcctaaattatctctataaaataaaattagaggcatataattgttcaggcaaaaagtgtgcccagcatttagggttctgatacatagtaataatttatactcccatcagtagtgtctgaaaactcagggtttacatttcttgtatataaggaatctcttgccatggattttagttccattttagttctatttagctttcatccccaggcctcttataatcctacttatttcacatatggtcctgatattatcagcttttttttttagtagccttttgccctttgctgcttaagcatgtgtttctggatgagattctgattcctaattaaatagattcagattactgattgaattttctgagtatcctgtcccatatgtcagtgtccctcagaaagtcaacagaaaactttggaatggtataataattaataattgaaagaagaattcaattaagaatatgaagttggccctaacattcattattcttattgccacacctggttaacaatacattctttttttttttttttaagagttttttcgacccctccagaaaaaaaaaaaaaatagaataaaacaaaaatagatcaggttctgattaattataaaacctctggtttcaatccagtttgcagaatgataccatgggtataaaagtcaaaacattagctgaaaattgtaattttttaaggaaattatttcaatataagatacacatcatttgactctcttgttccttacagagtgatccaagaacaggacctgttactttccatccattgtcatttcatagaccccttgaagcaacccagtggttggtagcagcaatctttgtgcagatgaggactctgaagctcagaaatgttgtataacttgtttaatacaaagcccacgctctttgtattccatcagaccatatcctgtagatacatatacattgctagggaagtacactatggcaactgagacacctctcacaaggtggtatcgtttataaaaaatagcattatgtatttgtcatcattgcttggttgagtgtccaacacagaaataaaaataagcagggtgccctctttggcatggaaatattctaattcatttccccagagaatgaccatactcaccagtattattttgctctacttgtttgcttttaatcataatatatgcctgtttactttttgtagctataaaaaggtagataaaagaagcactttaggtagatataaaaagcactttaattaagaacatgaattaaaagatacttcaataatgaagtacaatagattaaggaatactttaatagattaaaataacttgaattaaaagatacttaaatgctattgttattaacacaaaggtttaggctaacaaaacgcattttcccaaatatctctctcacctccccccacaatttttattcaggaatgtaagaattgggcttttataaaagcaaccaagggctaaacatctactaagttcttagaaactttgaaggattacagaactctctttctataataaggtttacctgtttgacttgattttgttcaagatggcatttcatactggtgtaaacctaaacaaaaatgtgtaagatttatctcatagaaagacgtgcctgtaagtaattaattcctcactctaattactatttatgcctttactttttattgtaaacattcttgttggaataaactagaaataggttttttttctttacactaaaataactcatgaatagcaatgaaatccatgctgtataatattcaaatgagagatcaggaaagacaaggcttttagttaaatcagtaatattctgtgatggggaaaattgccttgaaaaatacacacacacacacacacacatgcacacacacacacacatacatactactagaaaaagtttgaggttcgattcagagtgtggaaggtacagtgtcttaaaagagtttcagttgcagcatttaggcagatgatcaagaatatgcagaagaaaacaaaagaaatcataattatagtttcctaacagaggtatttgatcctctgcagtgaaccataaaaaactagcgtgggatcagaatcttgagtagcatgtatttaattgtatgcatttcaaagaaatttgaacattttaaaaagttacaccatatgaaaaattgtatataaagacattttctataatattataataattttacaaatgaggaaacagggttagagagagtaagtgagttaccaaagccaatggctagaaagtgagagaggcagaatccaagtactagcctgggattcccaaaccaaagactgttcagctcagccacaagtggaaatggattcttatggggctaagtgattaccattactttaaaaactagtatcagaaatagatgacaagaatttaaatgtatatcaaaatatccctttggtaaatgttagtgtcctcacaggtaaacagagggcaccctcaaatttgagtaatttgagagggtttaaaagagggactgtttacaaaattgcagtcatagagacatagagaaatcacagggagaatgtgaccctcgggtttgtaacagctgggcctgtagaggcgagggaaaagtgcagttactggatgcccagaacagagggctgtgtggagactgcacagtgaccctggaagaaaagggctgcactgttaaccctattctccctctctctaatctcctgcctgcctcaccattggctggaatcagaatcagagagcaagggaacctgttgatgtattctgtagaaggccacatctctaagctcagaggagggtgggaaggaatcttcagaagcacttggagacattcaactgagtcacccaccctggactattcagagcggtctgcagactagagggcagtctctaaatggtttgttcagatttgctatgaaacaaggaacttgcatcagaatgtaaatcaattatgtcaccaagtgtactgtttagttcagctgtcattttattcatagcaagatgttctcaatgaaggaaccggtgtgctggcttacatcctggggccaactcctttcaccacagatgggccctttgaatagcactaaactagattccttgctctgtaggtaatgataaaaacgctggaatccctttccttgttttgattttcctaccttaacttctgctaaagagaagaataacgagtatttttctgtacctaccctgagcctggcactgtgctaaggtactttagatgacatttaattcttgcaagttagattattcacttcatctttacagacaagaaacagggccagaaagtttaagtaatgtgcctgtggtctagcaagtgagagagccagcactcaaattcagatcttactccaaagtccatgcccctcactgtttgtaggctatcccaggactgtgcttaaaattatctgacattaacaccaagaaataaagcagggttgttgggggattgccttatatggagacctatgactatgttctgtatacatatgctatgcatgattcctgggaatagataaaacccagctccccccaaatcagatggcactgtttgtgaatacgatgttactccacgttacaaggccttgtccagcccagccagccaggtcagagatgaattcagtttgtttctaagtggctgttgtctgttgccatctctttttaaacctgggaggtcaggaagaagatagggagaaagaattcatgagagggatgcatttccttagaaatgttattaattggctgggcaaaacaagagaaggaaataaaatagctgctccttactaagtaaaggcatcttcttcccttatctcattaaaaattaaaagcactcttggtttaagtagggcaaattagtaattaagtgctatataatgaacttgtataaacagaatattgaaggggaagccaaattaatcactctgctggcttgtttttgcccccattaatgcaccttttactcaggtccttcctgtgataccaggatgcattttctgctctcctctgctgctggagattgggtgggctgtgatagttgggctgacagatgacagtggactagatctggaaaagtcatgtgtaggggcctcgatggccatttcattttttaagccaaggctcatcagcacaagcctgcatgtgacgggaacagccttagacagtagcagggcaaggaagaattagacacaatgtcggtacccaaggaattcccagtctactggtggcgggaggttgggcacagatggatacagttatgaaaaagtctaaggtgtaatggcaaagactatttccttggactcaaatcttggctcagccacttaccttgggtgagttacttagtttctctgtgtctcagaggcctcacctgtgaaagattccattgcaattactctgcaatggaatgatggagcatttgaggagtgacttccactgtcttaagagggctgggaaagtcttccagaagaggcaacctttggctggtgacggagctagaactcagggtaccgtgggaccccccaggcctatgctcctcatctttgcagcatagtgcctcctctgaaagcggaagaaggagcttgggcctcaacccaggacaaatctctctccatttcagctcaacatagtaaatattagtaataacatctggatcctcagtctcatgatatgttagcaactacctgccaagtatgtggggtgaggagtagaaagagtaagtgagctgagtccatcacaggctgggtaagatgaaatcaaatggagcagcagaaagtagccctctaagtcaccttgctgaacctcacggtgatgccatctcctcggcttgctagctgtgtgaacacacctggctgggcaagctacttaatttctctgatctcagttccatattaactgaccccattgagtttctgcaaagattctgtgaatgaaagcacatttagcacaatgcctattcagcagaaaagtactattatcattccctgtgttcatttgatcttcaccacaaccctatgaggtaggtggcatcattgtgccactctattaagcaagaaattgaggcaccaagctattgaaaatctcgcctaaggtcatctagatggttagtggcagaacgatggtttaaactcaagtggtctggctccagccctgccctctgcgtatcccccacagccctgtgctttggagggcacctatagctaggtttgcatgtcacatgctagaaatagggtagacgcttctcaaggatgtccggacctctctctcactactgaggaagaagttatttccttctgcttgagggaatggtggggcagagcctacagctgtggtgaccctttgacaggtggggcaggtagagcaggcacaagtgactcaccagggagcattagccctaggatgcagtaggaatgcagctgctgcactgatcttggcagttttgattagtgaacagaataatttatttgtcattcatactctgcttccataaaggatttaagaaagcttacaataagtgactaaatagttactggaataaaactcataagttagaaatgatgtaaaaagaggaaaatacacatatatatacatataaacatgggaagataccagcaaaggacaaggtgatttgattctgtatcaggtaggagaaaagtactagaaaagtattagtattaatatttgtattcaaagtactgccaaagaatgttgaaaatcagattgttttaattctggattggtgagtgccacaccaaatatctatgggacagatctggcttatctatgggtctctgatctggactaggcagttattattatttttttttaaatgaggtctcgctctattgcccaggctggagcgcagtgacataatcatggctcactgcagcctcaaacacctgttcaagcaatcccctagggggttactttgactgaacttcaggcaaccaaggcaaaactgggaaaagtgtcaagtcatatggagtcaaagaattataccaattctttgaaagagaccacatttttccttataccaaattctaaaatcattatttctttaaaaatgaacttagaaatccttccatggaactcttatagaagaaggcagaattcattatataccaccttgctgagagcccagatcataacattgaaacctgacttcgggtctaggataggctgggtttatagctttttggagatgtcacttgactcagtgatagaaccaagaatacccagtttggtagagagatagcatgtcccttcacctttttccatgaatattccttcccttggccagctttgcaaacaaagctgtgttactgacctaggagtgtctcatagtacctcagtactaaagctttttacaagcctggcatcagagaagtgctaaaatgaagcacccgtcaatcgagaagggcaacagatgttgaagcatatcaaatatcagtaaacagcaagccacagagactgctgaacttggcatcctcatagcaaaaataccctgttgcctttaagagagaacgctgtggacttttataaaccacattaagtgatgtatttttttctccatttggacaattgctaccctatgaaatattttccctgaaagatggtctgctatcctctattatttttttttaatctctacttttttaagggcaaacttaatgctcacagagtgttctaggctctcagccctggaaatataggtctccagaaattgagaggagtttcatattcagcttatctagtaccctctcttttactattagccgtatgattcatattataagtaataaatcgagctgtatttcaatcctgtagctgtgcactagattagtccctttacctctctaagcctgcttactcatttgtataaaaataagactattaagaacacatacctcatgcaattgttgtgaaaattaaatgagatgatatgcaagaagtatttggcacagttgctagtatgaataaactctcaatgagaggtatacaaaattatagcaatatttatgatgatatctatcattactattagctgactataagtcacatgctgtattaatgctttacatatattactgaaaggtggctgggctggtcctttgcctgtttgctctcagagagtgctccttcccctgctctgctgtgtgttacacttcctaggctctcttgcacctggcctctgagcaggcttggccattgggaggtaatggtgggagaatgactgatgtgcaggcagaagtcaggtcatttctccccttcactacagcagcagctgcattttctgtctgattccagctcccagcctctctcagatcccagttctggccactcagcttttctttggtttccgttctatactgacattccctgttcctggctctagtcacaccactgcctcctgtcatcccttgattcctaagaggggtagcatctgtctgctgtcggtaacctctgtgtggcttcaacaacctgttgggcttctaggtctcttctgtcactaatgaaactaatttcttttttttttttgagacacagtctcactctgtcgcccaggctggagtgcagtggcacaatctcggctcactgcaagctctgcctcctgggttcacgccattctcctgcctcagcctcccgagtagctgggactacaggtacccaccaccacacctggctattttttttttttttttaagtagagatggtgtttcaccgtgttagccaggatgacctcgatctcctgacctcgtgatccacccacctcggcctcctaaagtgctgggattacaggcgtgagccaccacgtctggctgaaactaatttcttatatttaattcctcctgttcaaagacctagagtaggtctttgggctacctagctaacttgactggtagtccagctacctgactggactctgactgatatcattgcttttaactactaaaagaaaaggtagtccttatagagaattcacttctcctcctctccctgttggagtgagccaagccaactggagaagggatggctggttatcatggagagacgttcacttggactaaagctcaaaagacaataaattgacctaagcatctttgatgaatactgcctatacacccagctgagtttggcattgaggccaggagcctcaggtagcttaccccctctctgaggagacaagattcaagtacaagtcatagccaagcacactacaagatagtgtctagtcagaaggaataggaactcctctttcttgagccagagccctggaccattcactattctaggtaagtaactataatagatatgtgattattctcacatgaaaaatgaggaaatggaggctcagagagggcaagtgatttacccaaagtcacactgcaattaagtagtggtcttagcagcttaagtctgtatgtcctagaacctgtttatgggacttatatctgttcctcaaagttttctaatctttttgtcagtttcaaagcagatagtaagaaaactacatacataattcatattgccctggtcttgtagaaatgaccttacagaaacaatattcagccttattcacctaattctcagaacaggtttatgtggaaagtttattgtgttcattttttacagatgacaaagcagaatcaaaaaagtaaaggaatttacccaagttcataccgaacgttcatattcaacctggaatttgaatgcaggtttttctctccccaagcatatgctctttccacttggggacgtccaagaactggaccatatgtagtataagaccaagtgttttttagaattttttttttttttttgagatggagtctcactctgtcgcctaggctggagtgcagtggcgcaatcttggctcactgcaacctccacctccctggttcaagtgattctcctacctcagcctcccaagtagctgggattacaggcacctgccaccacacctggctgatttttgtatttttagtagagacaggatttcaccatattggccaggctggtctcgaactcctgacctcaggtgatctgcccacctcggcctcccaaagtgctgggatgataggcgtgagccacctcgtctggcctagacatttttttaaaaggttggggagaaaggccaggtaccctatcttccaggaacagacagttgggttagagaagtatatataaagtgacctgaaaccagagagtgctgttgcataatctactctctggtagtgactaccagcaggaaagagtagcctggctttgtgtaagaaatggggcttgaaatgggctggagtggaaacattaatttaggacaggcagagaagcagcaggaagagggatttttagataaaggtgctggtgagagcaaagaaacagatacagacagaacggagatcaacgttaactcctgggaagggtcccagttcaggagtagtgaaaaagaaagttggatagataggaccacagttgattacaggtaggggttgttaaccacaaacagatcaattaggaatttgatcagcagtcttgggagtactttttgctcagtattcccttatcctttaactgtcttttaaaaaaatgttgcaagctgatagtctcactttaaaaaaaaaaacgttaagtccttcttagataatactgctttctgcttaagaaaaatagcttttaaattagttcagcctgtgagtaataataaaagtttattacttatctctcacagttttgaagagtctctaaaatagaagggaatactctttaaatgcccctaaagtgctatcctctttcactacagttcatttgtgtatagggtgttataaaatcacacatttgagaatttcaggatggagaaagcaccttctgaagcaatgtcattgagagatggggagcaagccactttctaccagctcaaaatctactccctcctccctccccaacccctccctgacacctgggcctagaggagcctgtgtgttggatagagttgacggcagtgaaattcctaccaagttggccctttcagtttcacctgtcagtgtctctgatgaagagggatcttgacaaaccagactggtttggataattggactacagcagttgtcttcatctcagtaaactgactaaccactacagaggctggaggagaaatttatagaaaatcctaaaatggaaattgaagcaagtgtttcaatgactaggaaacaacaggctttagtgaggttccaacatattatagtatggtggggtgctgggactcctgtcttcaaggggcccctaaaagtgatagaggggattcatttagtatgccccagctgccatttaagcactttgtggttattggctcacttagtcctcacaacggtcccatgagatcctgatattagttgtactttgcacacaaggaacctgaatcaccaagaggccacgcgctttcccaagcttacatagctggtaaaaggtgaagctcagatacaaacccagattttctgactctgtggtctgttcactgtaaatactgaaacccatctctataaagctcctttgggaaactcatcttggtgaggcccacctctacacggccctacccccatgtgcccatctcttgcaccgcccttagatgttgccatgtttgctgatctcactcaagtgtgagcttccatataagggtccaagtcttactgatccttagccagtagtcagtgctggatacatgtatgctgtaccagactggaggtgaagttttacagagactttgtaatcttcctgaagctggctaagaaggcagccacctgtgactagttacacagaaacccagccacttaaagcagtggcactgctggggatggacttagatttaaagtcgctagcaggtaaaatctgacctatgtctccagaaacaactttacttgtgcacattagctgtgactgtaaactgctgcttaacggttctcacttgctctaatttttcaaagactgactccccagtcattagagtctgttctgttactagtaactcagtggatgatctggaacaagaggtctacctctttgggccacagtttcctcatctttaaactgaaagaatcagattctggttttcaaaaatgtaaagcagtggaacctttgggaggccaatacagaaaacagaaggtgaactgtgtctctggcttatccatcacaccctctttccccactgcctggcagccttggagggtctttgctgaacataagcactggactagatctttccaaaggaaataactgaaaatattataatgtttaataatgatacttaataattcaataataaagtaacttcaaaatagcctagcctaccttgagaaaagcaggttggagggccctcaccatggggtcactgtgcctgtctgtgttactgtcaaacattgtgtgttccaggcacggaggggtgtcagctcagcctgataatgtacagtggattggggaagctaaagcctctgggcctcattctccttggctgaaaacagactgcgtgtcatggcactggtgaattagaaattctatccagccactcttggagattgattttccgtctggggatctgacctcttgcttcactagcagaggggatcagactgttctgggaggagtcaacgagctggccctcagaaaagccttctctttcttttttgttctttttttttcttttcttttttttttttttttaactgtatgtttcaaagggaaagtctgattactttggggacttaacactaccagtttgaattcttcttggtacttacagccttaagatatccatacacccccacatccgtcctttgtgctagaagattactgaagatttaattccatttatgtcattggatttgtaaaaaaccccttttggattcaaagatgaaggcctcacttactttatttttgtcattttcacagaccccttatgtaaatgcctcaagagtaagaatcttgctcaagtgatttttgtatctccaatggctaacaaggagcctgacatagagtagctgcttggtaaatatgtgttcattcattcaacaaatacccccaaggtacaacgataagaaaaataactatagtcctaatactgatcacctctgcagttgactggaagagacagttaaaaagataagtacaaataaatgtatcttgggttaagtgctataaaggaaaagaacaggttcaatggaaggaaaaattagaattgttgatacatgaatggaagtaaatgacccggacttccaactctaaatctctgtctcatttcacctctttgtaaataatcattgctattatgttaaatatcacaactactgtcatttcttgtttacccactacattctaagcttggtgctgacatctttgtatttattatataaaattctcaaaattactctgcccgttaggctttcttatcacttattccaaatgcaaaaataaggtccagggaagataattatgtaacttgttcatgattggagagctaataagtgtcagagatgaattgaaccaaagttggtgtgacaaagcctctgttttaagcaaaagggaaaaaaaattctcattaactccaaggattatcatcaggagtccaacagggttcccaatttgggaactactatatcattatcatatggcaaatggtccactatgttagatgagaggacaaaaaaaaaaaaaaaagttgggggagaaactttgctgtagagtgggagggaaaaagaggaagatagtcttcttgcatgggccgtcttatcagcctagcaataataaactatcaccatagcaacaggaagtctaattgatggcagatgttgagccactttaaaagccacgccaactgaatgccaagctgatgctgtaaacctctctcctctcccgcggctagactaatcatgctatggtcatattggagagacccatctttcaagggtggaagaaactctggacttggcatcagaagacttgagtctgagcctcacatctgcccgtgctgagctctgttgccttgagcaagtcagttcatcaaaagtagaagatagttatcattaattttatcatcattattactaccagtagtaggaactctctgaaattcaatttcacaatctaaaagatagataatatttgtgtaagcatcgtcagaaggtttaaatggaataaaagatgtggaagtgcttagtaaactataaagtaattcacaaatacaaaatattaacaccaagagacagcttgacgtgctagaaagagtttgcattggcatcagacagatatggctgcttacagactgcttcatctgaacgcatcacttacatgctcagcctcagttttctatcagtaaaatttcttagtgtaaatctgtaaaatgttctacccatgttacaaacctgtggcttaattaacctctctacacttcagttactcctctgtaaaatggaggtggcactggcacctccctcataaggtcgttgtgatgattaagtaagttaatacaggaagaacatttagaacagtgcctggcacaggcagcgtgtcatacatattaatggtggtaatggtagtggtggtggagaagaagaagaggaaggagaagaggaggaagaaagagcaattgaaatcatatacgtgcatagaactgtgaaagctggtggtaatggtagtggtggtggagaaggagaagaggaaggagaagaagaggaaggaagaggaggaggaagagcagttgaagtcatatacgtgcacagaactgggaaagctggccaggctcggtggctcacacctgtaatcccagcactttgagaggctgaggccagtgaatcccttgagcctaggagtttgagaccagcctgggcaacatggtgaaaacctgtcactacaaaaaatacaaaaattagctggatgtggtggtgtatgcctatagtctcagctactcgggaggctgaggtgggaggattgcttgaacctgggaggcagaagttgcagtgagccaatgttacgccactgcactccagcctgggcaacagagtgagaccctgtctcaaaaaaagtaaatggccgggcgcggtggctcacgcctgtaatcccagcactttgggaggctgaggagggcggattacaaggtcaggagatcgagaccacggtgaaatcccatctctactaaaaatacaaaaaattagctgggcacagtggcgggcgcctgtcgtcccagctactcgggaggctgaggcaggagaatggcgtgaacccgggaggaggagcttgcagtgagttgagatcacgccactgcactccagcctgggcgacaaagcaagactccgtcttaaataaataaataaataaataaataaataaataaataaataaataaaatactgaaagctccatgtgatacaagtgaggacctccatagtcaatgtcaaaatacttttggtcagttcgtggactggttcacatgtcttatcagttttctcaaagtttccattgtctacatagccttttttgtcatgcccagtatgcatgcctgctctgatccttggctatgaagttttcaatgggaaagggacaaccaggacaaagaattggtagaaaccatgagaaatattttctcagagaccaaggtctccacaggccaggatttctcagagtcttcttcgatatattaaaaagtatttctggaaaaaattagtttgaaaactgctatgatgttcaagataactaggtgtcttttttttttttttttaaagagatggggtctcaatgtgttgcccaggctggactctaattctgtgcccaagaaatcctccctcctcagttttccaggtagctgggactatggatgtacttcacagtacccagctctaactaggcgtcttcatagcaaggcatctgttaagactttaaaatgtaaacatgcattgtgaatctcccaggttggataggcatagagagtatggtgtttcccaaatttacttgatcgaagaattagtttttcatggagcatcttactttgctaaagtttcaagtaccaaaattgggaaatgttgatgtaagcccatagccaagacaatcaagccttaagcatagtaccacaaaacaggtttgaaaactcctactaatccttccatcaattcatgtatctatttaacaaattaaaagagttctatatgtggcagtgactatgtgctagatggtggagaaacaatgacaagcaagactagtatattctctaccctctcagagttctggtgggcctactggggagagggaaaagttgcccactaattttattgcaatgacaagtgaaaagatggagaggacaggtgccatgacaccgggagcagcggcttcttacctaacctggtgggtcaaggagagtttcccagggaaaataacttctaagtggagacccaaaggaggagttacagctgtaggacacataggagcttgcaacacactcgcccatgcattccatgttgtatcctcatgacaacctttcttggtagatgcaatgagagtggtaaaagttactaagtggtcattacgacctaatgagttcctactcaatgagtcaggcactgtgctaggcatcttacaaatttattgcatataatcttgacggcaatgagcagtatcctcagtttacaaatgagaagttgaggctcatgggagataagtggtttcccaaccctgtacatgtagttagtacaaaaccaggactttcagatctgcctgattccaaagcccattacactgtggtcaaccagtgctgggcctggaccgtggctggtccataacagggtttttactagtcagaaatacggaagagtaagcagaatgtcatgagttcttccttaagctaatttttttcttcttaaatgacatattatcctgagatgtccccctcccaaccatttgatgtagaaagtcctgtgggttttttttttatatattacttgtcagagaaaactttgagcttcttcttagcaaaataaaaactttctaaccatatgtcagtctcccaagtcattttggaagtgttgccatctatgaaatctaaaaatcatggaagttctgtgtatgcaactttctagaacatattccttctaaaagtgagagaaatatgaaccagcacattgctgtgagttctgctggttcaaaattggatgagttgctgaattccatgggcaccagcagccaaaaatggagataaaataagatcaagtgtcatcttccaaaatgtacagacataccaccagtgacattcaggcattctacgtcctggtttatagacaccctttttctaagttttaatagatactagaaaagtacctagcattaaacctgggttttcatgaacatttttccctagaaaattttaaaaagaaagaaaagtttttttcccaggacttaaagaaatattttatgactaatcaatactataggtagtacttgagaaaagaaaataattgtgaagataggacctgaattactaaaatgtgtgaaatagtacgataatatgtataaaagtgcctcatgcataaaaggccccagtaaatgctttcttcctccctgattcacatggtgagcaagtggcgggggcccaggactaaacctcatagcatcagactcccagtccagtgctccttccaagaggcctttcaattgttttctttctgtctacctacctcacactgtgtccttcatctctctgtctagcccccaggaaaagtgcagcaagtgcaggtatttctgaaatgacgagtggctcgcaaaaaggatctgatgagtgttaatagtaagcaatgtgtacctaagagtgtagacactattagcatttggaaaaataggaatctgaactgagaactggaagggcccttagagatcatcccacacaaaccctctttttacagatgaggaagttgagacccagaaacgggaagtgctttgtgcatggccagagagctcgttgctgatcaaaccaggacaagcatccatatgaaacacgcaaatgtaaaattacatgaaaaaaaaaaaccctttacctccagatgtactgctttccagaaaagtggcgaggaaataccacaaaaatacctttacttcaaaaaatttgaaaatgttgaaggtcatgcttcatattgtgccaggcaagagaacattgtacataattgtaaatcaccattggaggaggtggtcctggttgtattcttttgtttgtttgtaatacacataacataaaatttatcatcttaaccatttttaagtgtacggtttggtggtattaagttcattcacattattgtgcaaccatcaccaccatccatctccggaactcttttcatcttgcaaaactgaaactttacccgttaaacaataactctgcattgccccctcccccaacccctagcaaccaccattctactttctgtctctgtgaatttaactactctttagatacctcatataagtggaatcatacagcatttgtcttttgttgactggctaattgcatttagcataatgttctcaaggtttatccatgctgtagcacgtatcagaatttccttccttcttggttgtattcttaatgcaacatagcttgttctctgtgatctgctgattataaccatcgtcgctgtgaagactttggcgtgcttaacatttttgtgacttctttccagtgggggaaatagatagctcagttgtggacgatagcagcaatgggaagcagtatttgagaagaaatcagactctcttcttccagtcttttgcaagtaggtgacacaagaggtaaacagaattgcatgctgtgcccctccacatcaccccctattttctttgtttcttctgcccaaggcttcagtcaatcagagaagcaatgagagttgaagattttaaaagtgggttttcaaataagacaagcttgggttccagtcctacctctgaaacttactaaatatgtgatcttgggtaacgtgattgaactctctgagcctcagttctgtaatctgtacatagagataataatacttttatcaaaaaagcatgtcttttttttccttctgattgatgagatgctttctgtattttttctggatttaaacatagtttccaaagttaaaatattaatagtacttttccctgtcccattgggttgtttagaaatgtaatgtgatatatgacattttggcctctctgagatgtcttgttccagcccaaagattattagggaacctcatgtcatttgaaaggggagaaagataatttattgataaggttctgcatgtcatatgtatcatttttttctcatcaaaaacactgagtagaactctattatgatacttggtcctttacttcatacttttctatcttcccagctagtcagaaccatgcccaccccgcagttcccaccccttggtcagtacctagcattatgcccagaaaaactacagatgcttcttcacactcccctccaacccccacacccccattaccaaagtgtttctataatgctctgggaatcagcatctcaattcccccatggcctcatggttaaacataccattcattcgacctctcaactgtgacaaagaaggaagcctgggtgtagaaactgatttcagctcccctctgaagttgggcgtctctctttgctgaccacttgggaatttttttttcttgcttctgacccacctctcccctttcttttgataaacaggacagctgtccccaaagggatgaatccattacctttcaccagagttgagttcgttttccatttcatctttctgcttaaagagaaagccctttaaaagcgcagcgcatacattgagtgcgtgtacttaatttttaatatgtgtgtgcccacagccaagagaacagagaaccttaaataataatgaaactgaattgtacatgtcgtatgttttatgtggcactgattcctaaatatgctcctagcagccaggtattatttaatacatccccattaatcaagctgccaaatctaaatgaaaaccatgtttaaatatgtttaataagattatagcttttggttgaatatcaaactaacatagctacatttttccttccagccagctctcatttactgtcttacatttttactctgaaagcttttgtactatcaaaccaatcttgattataaaacaaattataccacaaacttttagtatcgtgagcttcagctgagtccctcagtgtaaatgttaggagaaagaacagttctgagattttttttctggctaaaaaatgatatttttcttcttcttggggtgagcctttgagtttaaaaggaaattaaaaattcaattagagatactaaattgtttgtagcttctgtattaaatgatgtctgccttttgcatagttattgaaagtgtttcatattaaatgtactttttctttttgacggttcaggcttctgttagttttgcaatagtgacacctaggggctgtagagaacattgcatgggctgctaaaatctcaaaaacaacccctctgctcttttgccatggatagaaaaagtatttgtgggtcattggggctgatggagaaagaaggcaaatggtaccctgggcgaggtaggtttccagttctatttaccaggcttccaatatgcaaacaaaaaaaggaggtaaataaaaagaggtttttataaaaataaagaactagctgaacttggagtaacatacagtattctagcagatttttaaagttattgataaaacaacatcatatttattaacatgtttaattctcgttcttatttgcaacagtttgcctgctgttcttgcctttgtaacaggcatgtcccgcgttgattgcagagaagtgatgactgtatgtggtgctttgacttgttctgtgcgaatgtctcgcttctcacatctctaattcttctatttgccttgttcaatattctatatccatattcacccttataaagttgtcattgagacttttagcctatttgttctctccactgatatcattatttcttctagcttctcagagcccttacattttctccatgtttatatggcttgaagcttttaaattcttgatcaaagcaatcataaatgtgtctgttacaaacacattaaaattcttcgattatataaaaactgacaaacaagtcttataaaactgtttttgtactacattaagttcaaaataggtggcacatgtttaactttgtacactgtaggaattctaagaatcatttcaaaaagaaaaagcaaatacagtgcacagcaatgcatataattcttatagatgagtattatctatctgtcatatctctctgtaaataatgatggtgacaatgatgataggcaaagtttattgatgttttttatatgccaagcactgttctaaccactttgcatgaattaactcagtcaccatgggacaggaactgttattatcccaatttttacccacattcacagaatgcttctgtgttccaacaaggaaacttcaacaaagtagtgcatgagcttatcacaggtcgtgtgcaataagagtttatgttattagtttttccttgaactgcttgggagtcagtgtcacttttcttagccccattagcctgccctccctttggagtgtgcacgtctcctttactgtctgatacctgtctgctttcctcactgagtgcctctagctttgtctagcaacacctgccctcatagaacttacattcagttgggaagatcctaagaaacagcaatcacaacaagtaatattgatttcaggtaacaagaaatgttacaaaagaaagcaaagtgatatcagggagcaaaaatggaatgacagactgggtgtgaagggctggctttgtgagcaggagagaggccctcctgaggaagggatgttcgtggtgagtcccaaatgacagaaaggacagcaagtgcaaaggccctggagtgggaatgaattgaacatgtgtgaaggaaagcaaaaaaagcagggaggctggaatgtgttgagtaaggagaatactgtggggctcctctctctttcctttctctgctgccaacacttgtgttttctgtctcagactctagtttcactgaattcaaagaaatggtttggaattgcaaaatcctgagatgtcatccactgggagtgctggggatagggggacacgtgcaagagaattggcctaagaaaggttataccctgagtatcttccatatatacccatagccccacacatttttatcttgcaaagtcagttaagatgaacataaggcagaagtggaatcccagcacagttcatcctcagtgctccacagcacggaacagaccttggatatcgtacttcacacaagtttggtgactctttttttatgtctgcctctccactagactggaaattgactgaggacagagcttatgtcataatcattcttcagtcatttttctttcttgcattcattttatcagtaaatgcttcttgagtgccatctgtgtgccaaccactcgtactaggcccatctatctctgcttggataaaattccaagcaagaaagatacagtccctgctctcaagtttccaacagtattgcagaagaggcataccataaaatagcatcatacagtgtgctatgcctcagctttggggaggcagagaaaatgttccaaaggaagtgacagttgagtccagtcaggacttggaagtataaataaaggcgagtatatgtctgtatgtgtgtgtgtttctgtgtgtttggagaggggtatgcatgtgtagtgggcccgagatgggagagaatgtgtgcagaattttaaaccttgggaacaaaggattcatgaactcagaggtgaactcaactgtgtactggatgaaaatgtgaatgaatgagtacatgaatgtataaatgaatgaatcagtgagtgagtttttcagaggcagctcatgaaatggagattgtattagcgtgtttttacactgctataaagatactacctgagactgagtagtttaaaaacaaaaaaaggtttaactgactcactgttctgcatgacttacagtcatggtggagggtgaaggggaagcaggcaccttctttacaaggcggtaggagagagagagcaggggaaactgccatattaaaaccatcagctctcgtgagaactccctcactaccatgagaacagcatggtggaaacagcccccatgatccaatcacctctcaccaggttcctccctcaacatacggggattacaattcgaggtgagatttggatggggagacaaactatatcagaggtataaagccaaaaggcatttttattaatttaccctgagaaatcactattccaaattctgcccattatttccatgtaggcagactcatatggagacctatatctttatcaaaaatgtgcttgtcaagtagattattcagtgacttattgggagaaaaggttaggcattcatcttattgtagggatggctttatcaatggaactgcatatagctgatggccaatattcatctttatcctgaacattgcttagatgagaactatggggtaaacaaatgagtgaaaaaaataagttaaaatgtcaagggtgttcatagaagagagagaggctgttaatgtggtctagatgccagaggtggagagctggcttggaaagtagggactagattctagtctttgctgtactactctcttgtgtgacattgagcaactagccatcttcaaacccgtaaagtggaactatgccaggcaatgtctaaatttagtctctatcagctctagaattttgtgttcatcttagttatacctgctgaggagggagaggtattgaatgtgtatggacaccagctgggcagcttcctcatggtccctggatgacagctttgtcctggggcactcaatcctccagagtaccttaagaagctgtcctaatctgccatacacttgggagggttctggctgttaaccacctatgttggacacactgctgctattctccttccccacttttatctgttattctaaagtgatctgagaatttggctattcctgatgttgccttttcttatactccacgtagggagcctctgctcagagggttattcgtaaaaattaatgagatacatgtaaagcagccagaacagtacctggcacatgaaaaatagtttaatactatttgtcataattattcctgcagcccttcattgttgcctttcttcctcaggtattttctgccttgttctccaacaagcacaagggatacaggggtaaataggataccatctctgtgctgaggggttttgtccagtgctatttactgagtgccttccatgtgccaggcactaaggttaaatcattaagcccccaccacaatccattgcaatactcattatacccatttcatcttccaggaaagtgcatcccagaacagaaaagtcatgtgacattcccagcatcacacaattagtaaatggcaaagttggaattggagctccagtctcacagactccaaatccagtgttctttccaccatgtcacccagctaccacaaggctgccattgcacagttttgaaaggacaaagaagcagcagtgcatgatggaagtcagcataatgggaaataagctctccttccctgggcatctacttctaacttgcagaagaataggaaggctagtcttgtgagcccagctcccagcagtccttgctttagcccatctgaaaaggatctgtctttaaaagcaaggagccagaaaaaataattcatactaaaaacaaactctgtcatgagtcatttgactttgctttcccctgaacacatagtttatgtcttgggtgagctaaggctaaaggaacatctgatatgttttaggctagcagagccattatttaaggaacttcacatccaatgtgcgcccattggaccctatggtttaaatcaagtcttctgcttatggggcctgacaatttgttattcttgttgtagttgtattggagtgtgattgtgtacatgttttatcaagatgacaagaatcactctggttcatgattcaaaagttctcaggctgttgaactagcctatgcagtagttactctgagtatgtgcgctagacaggaatgtgtatatgtgcgcacatgttcagatgtgtgagcacttacagaaagagaagagaatgagagaaaggcggattccagctgagcatcttaccattcctatcagcagaagagcgacccagccctggggctgggtcagaggatttctcaatcctgggagaacagcagataaccccgagcacaaagcaagtgtttctgtctctgttgccaacttgcttttctttagatcattgaaaaatgacaggaatacacttactctgtaaaagcacgaacaatgtaggaatatatagagtaaaagcaaaaggcacaaacctctcctgatcccaaaagtaatcactattatgcgttttgtatgtctgtcttacattttttatgtattcacagacatatatatacacatatatatcatatagtagagattgtataatagaatactatactgtttaaatagtagaggatgaaaaagagataactttttttatctacaagatactttggaatatattaatacatataaagctgccccatgtctattacatgctgacagtaattccagaatctgcatatataaaaaactgtttaaccaatgtgttgatagacctttaggtagtttctagtgtttagctgttacagagacacaaagattattgttggtgtagttctttatatacaaatatgaggacttcttttagagaaatacaaaaaaaaagtggaatttctagtggaaggatttgtgcatttaaaattttgttagctgtggccaaaatgtcctccaaaaaagctgtcccaattcgtattcctgccaatgatgtccctgtgcctttgccaatgctggatattgtcagttgtttaatattttttgccaattttcgggcagaaaatgactgctcattgttcttttcctttgcctttccccattactagtaagaatgaacattctctttatacccatcaagtacttttctgttaatggcctattaatatcttttcttcattttcctatagggttgtttgtcctttcctcattgatttagaggagttctttatctgctctacataccaattctttatctatcattacatactgaagacattcttatagtatgtcccttcttatctacctttgcttacaatatctggtaccggagttttaaaacttcataaacttttatctgtgaatctctttatgacatcagaatttcttggaaatgttccctttaaactatttctttacttgaagctgtgtttttcagactgataatgttttagacttttatgtgcccaagagtaaacttttatgtgcccaagagttttagacttttatgtgcgcagtaaggactgaggaggtgagtgttttaccaagggcaaagctgagatcagaacataccaggctggcaggtccctgtgtttgttaaagacattcttagtaattttatcattaattatggggaaattctaaaactccattgggatcagccacaggcaaatgagatgctgcaagaagctggatactgagcatgcagcctgaagtcatctgagcgttggatcataaccagcttcctctacttaccacttgactttgagacataactttgcttctctgagccttagtttatttctctgtagaatggagctaatcacaacttcaaatgactattgtgaggtttcacatttcccatgtttcagcacttggtatctgctcaatacatgtttgcttttgccttttctggttaaagaccttttttcccctggacctttgaatgcaactggtcatctaaaactattgacttccatctcttctgaggatttttgtagccaaatggtggaggcatatctagcttgagagtctgaggcaatttcctgatgatacatctcagtgggcctaaaggaaacgaaacacctacaccattgctcaatgctggaaaattctccacagtggccgacccctttaggaggagggaagccagggctctggggaacagctcctgtctacgtgggtggagagttctttcttcaagcattgtggatcgtaaactcactgagcctcctgcctgtacaggaataaatttcccctgcctttgagatcatctcctcttctcctcacctcaacctggcatccttctcttcttaaggcaacacagcactagaggctgactgcccagcctcttgagccagacttcctggaattaaaacccagctctgccactctttacttgtgaggcctggagcaagtttcttaattactctctgcctctgtttccctggctgtaagatgagagtgctaatgttatctacctcacagagttgttacatgggtcactatttataaagtacttggcacatagtacagtactcagggagctactaataaatcatatatggtatctgaatttgggcttctcatttcacagccaattgactttggataatatgcttactccaagctcagctctctaatttgtaaaatgagtatgaaaatatctacttcatggaattgctgggcaagtcaaatgggataatgtgtgtaatgattgtaggtactcaagaggtggtagctactgtggtgatgagtatcaaaaaagacaggaatgaatatacagagactatcctaattctcaaaagccaagagactggtagaatgtggcctccacactcttagccctgtgaccttagacctaacctcttcaacattcagtttcctgatctgtagaattagattgacaatggtgcctacctctaggttcatgatgaagaaggagtaataataaattgggttcatagaaagtgcttaataaaattaattattattgttacctgtatctcctgtccatttaagggaagattcctatttgtagtcaggggtccctgggcagaagtgatgacagcacaggcagagggctgcaccccctgccctctccaactctggggatatagcacaaggtaagaaagagaagcaaatctaaggaagggaaattgagatcaaagcctggtttctatggatcaggccaaaatgattgagggagagagagaaacacaactcaggatgtccatcaggatttatctgcagcagtgtgtctcattttaactcttaaaacagttttgttggataggtactattatttccagttttgcctagcgaaactgcgagctggagaggttaagtgactcgcctaaggtcagatagctaaaaagtagaaaaactgggatttgagcccaagtctgtccaactctaaatccctaatgatatgcttttaatacatgccttgcctctgctgggaatgactcagaggccaagctgtaggaggagggggagagagggatgactgtgtttctcagggtgaacagagtaggcagccacaggggcagtaggcccggagctaacaggccttcatgtaaaaatttggaaattttgcctgaaagacaagagagtgttttcagctgaggccgttttcaactgtaccctgtgtactaggctgagggtaaaccaaaacacagccataaatagttctccacagaattctcgtcacaacagcccactgtattccttctgtttggagatgaatgttgaaacaccatgcatgaaaatggctgagtctgttgctgttcatgaagtctagtcacagcccattcaaatgaagcccccttggatgtgaatagagatacgagaatcagcagatgatcagccatcatggactcttgacaaatggctttgcccaaagaatcggcatccttggacttcatacaaagcaggccttcccaaagcctctgttttgaagggacccagtctgtttgaataggtgtttacccacttgctacagaatatgtttgtatacctgttctttaatttaaaaaagtatcaaagctagaagggactttaacaagtcatctagtccaatgcatttaaaagaaggggacatttggttccagagtaggaggtaactgtcctaaggttatatagagagaatccgagatgaaatccagggcctcctgtttcttagtctaaaacatgtctgactctgcccttgtgaatgcagccaatacagggacaaaaagtctttgggcttctctaaagggagggactgcaatgtgttagaaatgggaaggaggttatgtttgcccttggtgctttctacctttcccatctattcttttcctcccatttcattttttttttcctcatctgtcagaactaaccagtctaatgtgctcaattttcattccctaagaatcagactcccagatttccagagttactgctgtttacctatttcagagcttttccctacttcaactgggctgccttttgaacaatgaaagggaccctagaccaggggaataccaggctcggcccctattaagtgggtctccttggttaagacattgcctacccaagtgtcaattctcaatctctaaggtgcaggtgagaaagaggaaagggacaaatagtaattgatcacctgatacatgctgaactctaattatataaccagacttaatctttaaaggaggttatgtgaggtgggtagatattattatcttcatttgcaaatgaggaactagatttctagaaaggtaattcacgttctcaaagccatggaatcagaaagggagagagttgggacctgtacctagatttgtctgaaaaatccaaagtacaggttgagcagcgctaatttgaaaatctaaatccaacatgctccaaaatctgaaactttttgagcactgatatgacacccaaatgtcatgctcaaaggaaatgctcattggagcatttccagttttggattttggattagggatgctcaaccagtaattatttaatacaaacattcaaaaatccaaaattaaaaatacttctgattcctagaattttggataagggctcaaccttttaaactaaacctgtttaagctgtttcaagtttgccaagtaagagaaagtgagatgaatatatgtgttcatacacacacatacacacacacgcgcgcgcgcatacacgtcctcactctgtattagtccattttcacactgctataaagatactacctgagactgggtagtttataaacaaaacaagtttaattgactcacagttccacatggctggggaggccgcaggaaacttacaatcatggtggaaggtaaaggggaagcaggcacattcttcacaagacagcaggaaaaagagtgagtgcagaggaaactgccacttttaagccatcagctggcatgagaattctctcactatcacaagaacagcatgaggaaaccacccccataatccaatcacttcctaccaggtccctccctcaatacgtggggattacaatttgagatgagatttaggtggagacacagaatgaaactatatcacacacacacacacacacacacacacacacacactggaagagtgctttccaaactatgaaatgccgcccacaggtggacaattagccacccagtccaggccaagaatgaagtggctgtcagcatgccacagccatcacacaaggaatctacttgcaagtgagaggagcggaggaaacatttagaggcaagcacctatcagttaggtcagtagttctcaaatgtcactggagggccactgcaggcagggctggctacaatttgtatatcccccaatttgtgggacccagtgcaaaatgaaaatgtaggtccctgaccagggacaggaaagtcactccttccaacaggccttctgtctcaacctatggctgacaggtgacttccaaggctttccaaattctacatggaacccctctgtgtgttgtcagcctgacactccatggcagtggtagccagctggggtcactgccttgacccaccctgagacacagggggcccaatgtctggcctgactctttccacacctatgctcatctttatgaggagaagagcaagagcaaaacatgcccccacccctagccatgtaaccctgccaccaactcacagatgtgtggtcagcagtgggatggggcagcagaagacagggagtggatggccaagaactggccctggagactagccccattgttccatcaatttttcacctataaaacacagattcaaagataaaataggattccttatttaataaatggtgttgggaaaactggctagccgtatgcagaaaactgaaactggaccccttccttacatcttatacaaaaattaactcaagatggattaaagatttaaatgtaagacttaaaaccagaaaaaccctagaagaaaacctaggcaataccattcaggacataggcatgggcaaagacttcatgactaaaacaccgaaagcaatggcaacaaaagccaaaattgacaaatgggatctaattaaactaaagagcttctgcacagcaaaagaaactatcatcagagtgaacaggcaacctacagaaggggagaaaatttttgcaatctatccatctgaaaaatggctaatatccagaatttacaaagaacttaaacaaatttacaagaaaaaagcaaccccatcaaaaagtgggcaaagaatatgaacagacacttttcaaaagaagacatttatgtggcctacaaacatatgaaaaaaagttcatcatcactgctcattagagaaatgcaaatcaaaaccacagagataccgtctcaacaccagttggaatggtgatcactaaagtcaggaaacaacagatgctggagaggatatggagaaataggaacacttttacactgtttttgggaatataaattagttcaacctttgtggaagacagtgtggcgattcctcaaggatctagaactagaaataccatttgacccagcaatcccattactagatatatacccaaatgattataaatcattctactacaaagacaaatgcacatgtatttttattgcagtactattgacaatagcaaagacttggagccaacccaaatgcccatcaatgttagactggataaagaaaatgtggcacatatacacaatggaatactatgcagccataaaaaagaatgagttcatgtccttcgcagagacatggatgaaactgaaaaccatcattctcagcaaactaacacaggaacagaaaaccaaacaccacatgttctcactcataagtggtagttgaacaatgagaacatatgggcacagggaggggaacatcacagactggggcctgtcaagcagtcgggggaaggggagggatagcattaggagaaatacctaatgtagacaacgggtcggtgggtacagcaaaccaccatgacacatatatacctatgtaacaaacctggatgttcttcacatgtatcccagaacttaaagtataatttaaaaaacaacaacaaagaaagaattgaaagaaattgactgcaaacaattaatgcccagcttgggctctttctggatagagctctgtgcattgcacgggtgtattagtacattttcatgctgctaataaagacatacccgagattgggcaatttacaaaagaaagaggttccatgtggctggagaggcctcacaatcatggcacaaggcaaggaggagcaagtcacatcttacatgaatgacggcaagcaaagatagagcttgtgcagagaaactcccatttttaaaaccatcagatcttgcgagacccattcactatcatgagaagagcacaggaaagacccacccccatgaatcaatcatctccctccaggtccctcccacagcatgggggaattcaagatgagatttggatgcggacacagccaaaccatatcattccaccctggcccctcccaaatctcatgtcctcacatttcaaaactactcatgccttcccaacaatcccccaaagtctgaactcatttcagcattaactcaaaagtccccagtccaaagtctcatctgagacaaggcaagtcccttctgcctatgagcatgtaaaatcaaaagcaagttagttacttcctagatacaatggggatacaggcattgggtaaatacagccattccaaatgggagaaattggccaaaacaaagggtctacaggccccatgcaagtccaaaatccagcaaggcagtcaaatcttaaagctacaaaatgatctcctttgactgtgtctcacatccaggtcacactcatgcaagatgtaggttcccatcatcttgggcagctctgcccctgtggttttgcacggtacgacctctctcccagctgccctcacaagctggcattgagtgtttgcagcttttccaggcgtgcagtgcaagccatcagtggatctaccattctggaatctggaggtcggtggccctcttctctcagctccactaggcggtaccccagtagagactctgtgttaaggctctgacaccacatttccctttgcactgccctagcagaggttctccaagaggacctcacccctatagcaaacttctgcctgggcatccaggtttttccatacatcttctgaaatctaggcagaggttcccaaacctcaattcttgacttctgtgcactggcaggttcagcactacatggaagctgccaaggcttgaggcttgcaccctctgaagccacaggccaagctatagggacgcagggcaccaagtcctaggctgcacacatcatggggatcctgggcccggcccacaacatcactttttcctcttaggcctccaggcttgtgatgggaggggctgccatgaagacctgtgacatgccctagagacattttcctcattgtcttggggattaatatttggctcctcgttacttatgcaaatttctgcagccggcttgaatttctcctcagaaaatgggattttcttttctattgcattgtcaggctgcaaattttgcaaactttcatgctctgttttccttttgaaactgaatgcctttagtagcacccaagtcgcctcttgaatgctttgctgcttaggaatttcttatgccagataccctaaatcatctctctcaagttcaaggttttacaaatctctagggcaggggcaaaatgccaccattctctttgctaaaacataacaagagtcacctttgctcccattcccacaagttcttcatctccgtctgataccacctcagcctagactttattgttcatatcactatcagcatttttgtcaaagccattcaacaagtctctaggaagttcgaaactttcccacatcttcctgtcttcttctgagtcttccaaaccgttctaccctctgcctgttacccagttccaaagccgcttccacatttttgggtatcttttcagcaacaccccactctactggcaccaatttaatgggtgacacactcgtgcagctggtccccactgcaggtccttcacaaagcttcactagtccatgagaaatgaaacaataaggacagggtattgagattttaacaaaattaaatgtagactatttaaatgattctcctttattctgatatcatgataaccacttttttggtattaaaatctccttttggttatgaaataatggtgagagtaaatatggagcagttgctttgtttaaagtccttatataatcaaataaaaagctgacaattatgttgtagatctccaaaaagtttgaatattttattggtccaaagtttgagaactcctactctaagactttcaagaagatggcccttcccacatgtggggctggaacctcttcccctttcactatcatcagaaaggcttccgccctggatacaattagtatttgttgcatacttcagtattttctaggtatatctttgctttttggaagtctaaaacatctggtagaatctttcagaagaagcaacacagaatagaggcattaaaatcaaaatttgaagtctgaaacttctgtttcttaccatcattaagagagaagtgcccaatgacaatcatttctccaaaccatcagcagctccttggaaatgaagtggaagggtgataatatatccaggacagacctagctaatgtcttaatcttggcataattattaataataacattccctttccttccaaaaagtgtctaggactcaaaggtgagttcattgggataataaactatggccaccttaaatgaaggccccttcagctctcctgagctagaaagtcccaaagagcctgctctttccctgggcaggaagccatggtgaccagtggaaggattatgtctgtcttaccagaggcctgggttgggtgccagcatgaagcctgtaggatctacttagatctgggacttcaaagacctagtggtgggtgaatctttgtggcttccatcattgctttgtctctgggagcatcaagttgaaggccaagctagtttctttcctttgatgagggaaaatatgtcaacacaatggtccactgaactctgggaatagacagacatgtggtgtctttgggggattatagcctaaatggttttactctggcacatgtggaattaaatataaaacaaacagctgattgctgttaaattcacatgcataaaaacaaccattactatgtcttctcagctacagtaccagagagtccccctagaatcaagcagttattagatgggactttggagtgagtgtagaaaagaaaaggaggaggagaaggaagaaaatgaggaaaagaggaagaggagagagaaataacaagtcaaataggtggagagttttgaaagttacaaagtctgtgccatttagcatgagttatttttcctttttattccttgtatttgacatatgaaaagaaatctttgctgatactggcttcagattctcaggtttaagtatgctatccttgacccaggaaagagttacatgcatcatacttccgaggccttcaaagaacaacttggagcaagcttgagagtttgcagggcattttggtgacatttctggatgccctttgtttccccctttcaagaaaagccctttctttcgttgccttctcacataacagcttgggattcttgtccctcccagaaatgcatttgaacttgctgggtttgttaagagtcagggcatgaagcatttttccatggtagaaaagttctggcattccaaagcagaactaatgtgggatttgggaagcttgccctatttgtgcacttaattagagctcaccaaaagcagctgatccattggtaccataaaaaaccaatgctgagaccaaggaaggctaagactgtgagtacccttagagggtggtgaacatgaattccacacctgttccctactgactggaatcaggattcaaaggcaaaaagttgtgtgctttccagcaacattcattgggatccgcagcccaatttaatcaattgataggttgccagtgtctaagtcaagtcccgaaacacttggttccccttgggtcaatgaaatttggtcttggttctaatacaaactttaagttggctaaaaatggctgagaaaactactggttttagagtcagtcaagcctgtgctctaagtctgactctgccactatgagatgtcagatcttggagaaactgttcagttacttctgagctttagtttgcttcccggtaaagggacatactaacacctattccatgggtccattatatacacaacagccaacatttgttgagtaattactatgtgcagagcactgtgctaagagcacagtctatgttaactttttaatcctcatacagacctaaggaaatagattctatattggagattggcaaactactccccacaggccaaattttgcctactgactgtttttgaaaataaagttatattgagacacaatcacatccattcattcacatagaccctatggctgctactgtgctacaactgcagagttaaataattgtgacagcgaccaaatggcccataaaacctaaaatacttactatctggcccttcatagaaaaaagtttgcctctgctttaaattatctcaacttaaagatgaaggaaataagccaaaggtattaaaacctattttaagtaggttagctggggccacaaagctggtaacaggtaggactaggatttgaatcaaacagcctgactccagaacttgtgttagtcaccagtatcttatatataatatatatgaaatgcctagcatagtacctagcacacaggagatacttaatacatctgttttattagcatggtattccctttctttttacctcctttcccagtttcctatcaattccagttaccttttgcttttcttctgcaagataattcagttaagcatatttctggccaattctatgcccatgatctcagtctatccaacaactctatgaggttggtatcattattttcatttaaaagatgaagaaactacatcttgatctctgagctcccaggaatctttgcactccatttggggaccctcagaggaaacgttgctaggaacttttggaacatttgttttatgcggcaaactagcatcaaagaaaaaagaatctcagtggctgcttgagaaaggattacaatctaattagggagacaaaaccaaaatactgagacaacagcaggcattttaaagtaagttatttagtacagacagtaagtgagtgtgaattcagagagctgggaacaagagagcggacaggggaggggagggctctcaagtttcctggtcaaatgtgaactgtgccttgaatgacagactgaatttaaaaaggagaggctcagattcaggcatgatggaagcgggaaaaggaaccacagatttcctgcagaaatggaagtgagagctctcagacggacagaatcagcaaatccctgggaactgtagaaaatcagaatgagtaaataatgtggtgacagattctacaggattttgaaggccagagagaggtacctgggtttcagaataacaatagtgatcatcataacacttagttgcaggattgctgaccacacacatttcacatatgctcgcccttaaccctccttgtccattctgtgatgtaggtatcatcctgttttacagatatgaaaattgaggcttagattatagcaatcaaaggttgatgggaaaattagaaatattctgcttacttagttcaacagtgcagagcttttgtgttgttacgttcttccttggatacatgtgcttgtcgttgagattttatagggtaatctatataccctataaacccatttaatataatcataggttctgcttgttctaatactgttacctataaacaattccccatggactcagatggaaagtgccatgaattaaagaccttacactacctggaccactctgatactgcccaccacaggcaatgggcagctatggcatggtttagagcataggataccataatgaaaaggatcagttctttcaacaaaggccggatgggaaagacaggaaggaggaaatcgtgtgaacccagaagtgtgatattcgatggagaggcaatcctgggatgaacacccagagcttgggtttgggatggctgaagaacttatgccaagaagagaaggcacacatgtagattgagaaggccatgaccagcactgcttaagtcttaccacttagtcatagttgagggacataagacttgaagtatggagatttaggctcaagtcctagtctcacggctactggcactatgtgaagaaggacggaaaaggcaagaattatatgctgattgagttatgcaatatattgtgtcttcccatcaatagcacttaagtatttctgtgtgccagcactttctaatttctcttctaatcgcttaacatatattaacttatttagtcttcagagaaaccctattagattgggggtattatcatcttctttgtatagctggggagactgaggcacagaaaaggttaagtaacacacctatggtcacacagctggtatgtagagaaactacactttgaacccatgcagtttggcccctgagtccatgctcttacttactgtcacattacctctcaggagaaaacaggataggtgttacgagcccagttttacagatgatgagactgtgggtccaagaccataagggatttgactaaagatcaaacaactaaacaaactgttacgctggcatttgaactaggtcttcctaattctgatccagacattctttctatcagatcacactgcctcctgttggtgtgaaagcattttacaaccataaacctcctcctgtttattaacacattattatgatagatataaggcttctctgattcagtaggaaaactaaggaggtagatcagccaagctcgtggttggtagtaataaagggcttgccttctagacggtgactccctccaggagagccaccaaccagttcctaacctctgtttcttgcagttcctacagagcctggcatggggcagagggtggctctctacaaatgtttgttaaacacaacttgttccagatagaagcatgtgaggctctccactaccaccagtggcatagcaggcacacccatgcattagcgacttgccctctgccaactcctgggatggtgatatgatgatggttctttgtaagcttgtcacttgtccctcttccaaagtgagtttacccagaggagcattctgaggttgaatttgtcccataccaccccttcacctacacattgacactccccgctgtataccatggggtcagagaccttgcactacaaaggccccttgccaagcgtggtattgcttgcagcctgtctgaggctttcactactttcccccagactctcagcccctggcctcctggctcatggccactcccagtgcccttagctttagcttcctgacccccctataactggcacccaggaccacttcaccagcttccttctcagaacaattgacttttgcccctggggtacttatacctcttttgttcaaggtcacaccccagctcaacacccaggatccaccctgccagcctgtgtgagagccatccccactagactttgaaagggactggacagtgtgttcagccaccttctcaagggcctgtccctggcagctttactggtcccacctgttcctagcctaggagctgccaatccaacaagatgaggctattctgggaagaagcaggaagacctcttcaccctaattgagtctttcttaacaaagaagtcaacagaacttttttttttaagtgttttaaatactgcacaggatgctacagcagttaagagcatggcctctggaatcagaaggatatgagttaaaaatccagttctgccacttgctagccatgtcatcctagggaaattacttaacctttctcaacctcggtttctcatttgtaaaatggagctaaaaaaggcccacattactaggtaatcatgagaattctgtgaaatgatatatgtgagcatatgtcacagcatgtgacaagcagtagatgctcaataaatgatagttattatcagcattatattaaatattattaaagtatcttttaagactttctggagacatttcattcagacagttatttattcaacaaacatttatcgagagcctgcatttctccagatccatgctgagtgcaaatatgggatgtataattatgtttataaaaaagagcggtgcatgttaatcacttactataggccagacactgttctaggcattttaggaacattctttcatttaatattgataagggccttgcaagttggcagaaattataattgtcattttagagatgaaaaaactgaggttcagagaggttatccccaaaaagacatgacctgtgattgagtgtggcatgcatcacccttaaataaaccaaaatattttaagttcaagtccccactattgagagatcgacaatttactcccatgtagtagaatgcctttatataactttcttgttaaagtcaaggtcagagcaaagtggtgtgatttcctcctcattggtaaaaatctctgtaagaggtgagtgttctcgtgcctttgttagcatgccagcaatgagcctggggtctctcctctgattactggggatttcatcatcattcaggataccttctctcattatgtgggactgaaaatagagatagaaaaggcaacaggtaaggggctcatagtgaactcacccaatgcatgctttgcaagttattttgttttttaagcaagtcccagtcatgatcttgctttcggattcatgccttatgcctgtagccattgaaagccaagtatgtcagggggaaaaaaaggtccttcagttagctgaggttttattctgtttctactttggtggtttgaaactaattacagactcggttgtgcctacatgtgcaaaatgaaatgagaggttgagccaattactttaataatgaagagaggaaaatccacttttctttccattatctaaagatttcaggcatatgtgagttttatatatgtatatattaaattatgtgaaaaattggcctcaagccttcatttcactttgcctgtctagaaacagactcaaattttgtttcggaaaggagatgacatgccttaggcatcttccaggagactagagggtcttgttgtaacaattgcagctaagattgattttcttattgttatgatgaatacttgtgcctgcctgggggagggaggtatattatgaaggatgacttttaaaaaaaggctggaatacctagaataaactttaggaggaagtttccactcatattatttattcattcatttatttagttcttttcaggacctgcaaagccctcctggcctggtgctcactccctttctaatttcatctccttctgccacttgcccaaactgccccagcaggtctggcttcgttgctctctttccattcactgagcacacttccaactcagggctttcaagcttacagttccctccgtgtggaatcatctttccgttgattttttcattgttcactccctcattcccttggatctctgctcaaatgtcattttatcagagagatgccattcctagtcaccctatacaaactgcctgctccacgcctaccattctctgtcccccttgccctacttgatgtttttttctccctagtacttaccaccatctgtgtgatatatgtgcatgaacttatgtgttattttgataaacatgaccatatattttattttaataaactttatttttagaagagttttatatttacagaaaaattgtgaagatgatacagagagtttttcttttctttcctttgtttttttttttttttttttgagacggagtcttgctctgttgcctaggctggattgcagtggcacagtcttggctcactgcagcctccacctcctaggttcaagcaattctcctgcctccgcctcccaagcaactgggagtacaggcgtgcaccaccacacccggctaattttgtatttttcgtagagacagggtttcaccatgttggtcaggctggtctcgaactcctgacctcaagtgatccacctgccttggcttcccaaagtgctgggattacaggcataagccaccacacccagcagatacagagagtttttctaaaccacatacttagttacctttattattaacatcttacattagtatggtgcgttcgttacaattaatgaaccagtattgatacattattattattttattttatttgttcaccagtttggaatgcaatgtatttttaaacagagtgaaagacacctgacaggtaactgaacaagttagcattagctgggcccaagattaaccaacttgtatcaacattcacagacttctgcagattccctgaggacagcaatatccaatagtgtttacttgttttgtgagcacagtaatagaagcaaagcgagacctttgttaattaaagcacatattttatgcagatttccttagattttacctaacatcccttttctattctagcatcccttccaggacaccacgttacatttagtcatcatgtctccttaagcttttctggcttttgatgaccttgacatttttgaggagtactggtcagatactttgtagtatgtccttcagttgagatttgtctaatttttttttttttcatgattggagttttggtcttttgggagaaaacagaagactgacaaagtaccattctcatcatatcatatcaaggatacttactatcagtgtaacttatcgctattgatgttggccttggtcacctaaggtagtgtttgtcaggcttctccactataaaattactctttctccttcctttttacactgtactctttggaaagaagtcactaaacacatctcaaacttaaggagtgagtgagaagtaagttacgatctacctcctcgtgggaggaatatctacataaatttggaattatgctgtttgggagatttgtctcttctcatttatttattcactcattcatctgataactcatacatatttatatttttggttataatccagtactactttgttttgttactcagttgttccagttgtagccattggcaactcctcagttggctcctatgaccctttgacataatcccgtaattgtgtgtcttgtgaggttttaaaaaattattatattcttactttctggcactacaaggcactttaggctaattgtgcatatttcctgctccagttctggaatcagccatttctccaaagagtctgattcttttttttgttttgttttgttttgtctgtgtgacggagtcttgctctcacccaggctagagtgcagtggcacgatcttggctcactgcaagctccacctcccaggttcatgccattctcctgcctcagcctcccgagtagctgggactacaggcacccgccaccatgcccggctaatttttttgtatttttagtagagacggggtttcaccatgttagccaggatggtctcaatctcctgacctcgtgatccacccacctcggcctcccaaagtgctgggattacagacatgagccactgtgcctggccagagtctgcttcttgttactggagactggtggttagacaccaagatttgggcactaagtgtgctcattgctcttgggctattgtcaatgcttcttggccctcccagctgaaagagcaaggaaatgtgtatgtaccctaacccatgtatatacccatatctataaatatttctgtatgtaatcatctttttgatattaagctaaacatgaattcacactggtttcctactgtaatctattgccacatggatcattctaactcgctctccttgcttatatttaaattccccctcaaataatgagaaatctggctcccaccatctgccatccatttacttaattattcaatttcagtatacatgtatagaaataccagaattgttaactcataccattgcagaatacaactttattaactggaagacagtacttatatacagttttcttggcattttcttgtttttttttgggggggggtggttgggggtttttttatctttagtttttcagactctactaatttctgaagttacttaggtcagcaccttaatcacccaccacacagagtgagatcgttttatacactagtaacacagttacattgtttttgacatactacattccatcatgggatcccccacctcctgaatttttaaaatttacgtacattaaggtttactttttgtactctaacattcagtggttttgataaatgcataatgtcatgcatattcaattacaatatcatatagaatagtttcagcaccctaaaagttaaaaatcccatctgggcatggtagttcacacctgtaatcccagcactttgggaggcctaggcaggcagatcacatgaggtcaggagttcaagaccagcctggccagcatggcaaaaccccgtctctactagaaatgcaaaaattagccaggcatggtggcaggggcctgtaatcccagctactcaggaagctgaggcaggagaatcgcttgaacttgggtggtggagtttgcagtgagccaagattgtgccactgaactccagcctggacaacagagcaagactccgtctcaattaaaaaattaaagttaaaaatcccccgtgttggccaggcatggtggctcatgcctgtaatcccagcactttgggaggccgaggcaggcagatcacgaggtcaggagatcaagaccatcctggctaacacagtgtaaccttgtctactaaaaatacaaaaaaaaaaaaaattagccaggcatggtggcaggtgcctgtagtcccagctactcaggaggctgaggcaggagaatggcgtgaacatgggaggtggagcttgccatgagcagagattgcactgctgcactccagcctgggcaacagagcgagactccatctcaaaaaaaaaaaaaaattcccctgtgttttacctctttaactttccctccttttttcccaactccttgacgatcactgatctttttattgcctctatagttctaccttttctaaaatgtcacataattggaatcttgctccacatacttttttagcatttggcattgttcgtttttttattttagctattctaataggtttatagatgaatgtcactgctgttttaatatgcaatttttaatggcaaatgatgttgagtgtctttatatatattatgtgccatctatatatcttctttggtgaatcacatgttcatatattttgcttactttttcactacattgcttgtttacttattgttgaattttaagagttctttgtatattcagatacaagtttctttatcagatatgtgttttcttctagtttgtggcttgtctttccattctgttaaaaatgtctgttgcagagcagttttagaattttagtgatccagcttatcaatttttttcatggattatgcttttggttttgtatctaaacttatcacctaacccaaggtcacctaaattttttcctgttatcttctagatgttttatagttttgtgttttacaattacatatgtgatccactttgagttaatttttgcagaatgtctaatgtcactgtctaaattcattgttttgcatgtggacatacaatatttcaaacatgacttgttgaaaatattacactatatcctttgaattacctttactcctttgtcaaaggagttggaaaaggaataaatcagttgactctatttgtgtctatttctggattctctccttggttccattgatctatttgtcttttctttccccaaccttacactgtcttaattattgtagctttacagtaagtcatgaagttgggtagtgtcagttcactgactttgttctttttctttagtattatgttgactaatgtagatcttttgcctttccatataaattttagaatcattttatggatacttaaaaatagttcgctgaaaattcaatttatttatttcatcagagttttgtaattttccacatatagattctgtgtacttttgttagatttatacctaagtgtttttgtgggggttttttttgttttttgttttttgttttttttgcagcatgctattttaagtgttatttcttaatcaaattccattttttcctcaatggtaattgctagaaagaaattgactcttgaatattaaccctgtatcctatacccttacttgtttgcttattagttccaggatttggtggtgttctcattgggtgggttggttgatttgttcattctttgtgattttccacatagacattcatgtcatctgagaataaagacagttttctttctttctttccagtatgtatgccttctcatttctttgtctttttgcactagctaagacttccagtacagtcttgaataggagtggtgagaaaggacattcttgctttgttcctgatcttagtgggaaagcatccagttttccatcaagtatgataatagctgtagagtttttttgtacatgttctttatcgaggtgaggaaaatcccctatattcatagtttgctgtgaatttttaatttttaatcacaataaaaaatgattgttagatttttttgaaatatttctccttcatttatcaacatgattatataattgtttttatttaatctgttgatgtaatggattacattgactgatttttgaatgttgaaccaaccttgtacacctggagtaaatcgtatttggttgtggtatataattccttttacacgttgttggattgatttgctaatattatattaagaatattttgcatctatattcatgagagagagtggattttggctttctttttttaatgtctttgtctggttttggtaatagggtaatgctgacctcatagaatgagccagtaagtttttcttctgcttattttcctggaggacatggtaaagaactggtataatttcttccttaaatgtttgctaaaattcactagtaaaaaccatttgggcctggcactttggtttttggaaggtaattaattattgattcagtttcattagtggatacagctctattcagatgatttatttcttgtgtaaattttgatagtttttgtctttcaaagaagtagtccatttcatctaaattatttttagttgccaatgttagtaatttgtaacttctctctttttatcttgattaccctggctaaaggtttgtcagttttattgctctttctaaagaaccagctttggtttcattgatttttctctattgctttcctgtgtttaaattcattgatttatgctctaatttttattatttcttctgcttttttaaaattttaatttcaacttttattttagatacaaagagtacatgtataggtttgttacataggtatattgtgtgatgctaaggtttgggtacagatcctttctcccaggtagtgagcatagtacacaataggtagtttttcaacccatgtctcccctccctcctgtccccctctagacatcccagtgtctcttgttcccatgtttatgtccatgtctgctcagtgtttagttcccactgacaagtgagaatatgtggtatttggttttctgttcctacattaatttgcataggataatggcctccagctacctccacgttgttgaaaaggacgtgatttttttcttttttatggctgcatagtaatctgtgatgtacatgttccacattttctttatccagtccaccattgatgaacacctaggttgattatatgtcttcactattatgaatagcatggcaatgaacatgcgagtgcatgtgtctttttggtgaaatgatttcttttcctttggatgtatacccagtaatgggattgttacattgaatggtagctctgttttaagttctttgaaaatattcacagttaaaatgaattacctaggaatatactaaccaaggaggtgaaagatctctacaagaactataaaacactgctgaaagaaattggagatgatacaaataaatgccaaaacatttcatgctcatggatcagagcaatcaatattgttaaaatggccatacttcccatacagattcaatgctattcctatcaaactaccaaaatgatttttcacagaattagaaaagcctattctaaagttcatatggagccagaaaagagcctgaatagccaaagcagttctaagcaaaaagaacaaggccagaggtatcacaatacctgtcttctgctttctttagatttaaattactatttttcccctccttgtctccaatgtctcttttgcctgaaattaatgtaactactacaactttattttgattagtgttagcattgtgtagctttctgcatccctttacttataacctgtctaagttaaaagtgggtttctttgtaggccttattcttttaatcatctctggcaatttctttcttttaatcagtgtatttagacaattcacatttaaagtgattattgatatagttgggttattatctaccatgtttgtaactattttatatttgtaacatttattctttgtttacctttttttcctcttggcctttcactggtattcatcaggcattttatgtgatttcattttctctcctctcttagcatatcaattatacttctttttttaaaaggtagtaatgtccctaatgtttgtagtatacatgtttaatctaagtctggcttcagataacgctataccacttacatgtagtgcaggtaccttataaggaagtactttcaattcctccttcctatccattataacattgctgtaatttatttcatttatccatttgctataattactcaatatattgttactattgttactttaaacatataattatagatcaattaagagtaaaaagatgaaatattatcatttaccttcatttatttcttctctgatgcttttcttttatgtaggtccaagtttttgacctatatcattttccttctctctgaataactttttttcaacattttttataatgtagatctcctttcaataaatttttatttgagaatatctttctttctctttcatgtttgaaggatagtttcattgggcatagaattctaggttagtgaggtttttcttttaatactttaaatattttactccattctagttttatttacacggttttctgagaagtccattgtaattcctatgtttgtttctctatagattaggtggatttcttgccccctttggcttctttcaaaattccctctttgtctttggttttaattttgattatgatttgctcagctttcgatattttcatatttattctactttgtgttctctgaacttctggatctattgtttggtgtttcttctttattttgggaaattcttagccattattacttcagatatttcttctgctccattctcactttgttatcttcatattctaaccatgcatatgttatacgttttgaaatttttcttgggtgtcctgggtgtttccctccattcttttttctttttgcatatcagtttgggaagtttttaactgatgtatcttcaaattcactgattctttccttgtccttgttaaggccatcaaaggccttctttgtttctgttggtctttttattattattatcattattattattattaggatttcttttagatacttttttagcattttcgtctctcgttacattgtccgtttgtgcatagtgtttactttttctattagaacacttattaatcatagttgcattaaattatctgataattctaacatttgtgttatatctgagttgggttctgattcttgctttctctctttggactgtgtttttcttgccttttagcatgccttttaatattttgttgaaacatggatatgatgtatctggtaataggaactgagacaaataggtctatatgtgacattttgtgttagaaattgaactgtgtttaatgtttgttatagttgtacatgccagaggcctcacattcttctattgtccttattttttcatccccactattgtctttggcgtccctaagatctcctccttagatagagtctatgtcttgctgctctttgagctgtaattcactaatattatactggggtcatgtcgatgtggttttaaggtatggggaaggaaaagcattctataatcttttgattatatctgtcttttagtgggactatgtccctgagctatgaccttcatagatgttcttaggcccctactcctttaggtgagacagaaggcttgcaggcactagagttgaagagatgtccttcccctgtgtgcaataggcttttgtaaagtctcttcctcttaaaaggtctttattatggagaactctgtgttatggaaaaacactgtaaaaaatattttacagtgtttacgctttccctccccctgccagagccaagaggggatcattcttgactctttggattcctggaggtaaaaccgatgaaagtgtgggcccccttccactaagactgttaccctcaggagttgctcgctttcctattagtccacactcagcccccaacacttcaaattaccactgaagtgtccctaccagtttatgactccagcagctgctcctccaagtaagatctcagctgtgactgtctgggttgtcctttctcttcagatttcagggtgatagtttgtcctgtaacctcagttctcttatggatccaacaaaaatcactgatttgcagtttcttagcttttttttttttttttggagtaaggatgggataaatgacttagacagtttttacatgttggagctataaccacaagtctctacatgtctttaatgtacttgctgactttccctactggaatgtaagcttatgaaagcaggggccatgtctgttttattcatagctacagcttcagtagccagaatagcacctgactcaaagtaagcgggccaataaatagttgctaatagactaattaatctcttggcagtcattgagcatattgttataccaggcactgtgcttagtgtggaaagacatcaggtgcctacattattacagtggtgtgggggcagggcatggtggacatacaactaaaataacaataaaccacagatcagagaatagggaagttttaaagcactgaggacacatacctcatctagcccaagcaagagggaggtagaggtaaagcattgccagagaagaaaaccatcacctgagttgagttgtaaacaatgagtagctgttagcctgtatagtggagagggacccagccaaggagacagcacagacctgtcaaagtccatgtcggacaacatgcaaagtgatttacttaacccacctcatgaacgtttagtagcccacgcaaggcaggcccctgttaactcacaggtcaggaaactgagcctcagacagtttaagtgactcgacaaaatgtcaccaatgctgagtgatggagcaagtcggcttgaggccaaggtccattttctccctgctacaaagatgactaagcacgactcagagtctggtggaggagcagaacacataaacagtctttgatgatacccatgctcttttgaatttgctctattgttgttcattttctttaagatttcagccctagaagtagcaagctgaaaatcagggctgctttgcaaatgcccacaaaccactgaggggagttttgtcaaagaaggcgggaaagaaaaataaatgtgggcttctgctctttaaacctcagcccagtgaggcagactttcccggaatacttcaggcctcttcaaaggcctattgtggaaagtgtccagatgtgcgtggaaaacctcactgggaagcttcccggtgaagaggccttttaagcatgaaccgagatgaaggaagctgacgccatgagtcctatcaggtggccttttttctgaaggagcccagattttcccctaaccttaagaaggttgtagggggttgggtgattagccagttcgtattcctttgattacaggaagcagtggggttagttgttttttgttgttgtctttcctttttttgctgaagtgagaagaggagatgggggtggggggcattctccatatgatttatctacctgtaagttgttagtgacagtctggtcattcctccagcataccttgtgagggccaggagggatttctggattggataaagttgaggcactgagtaagtcctgctagtttctatgatgatgcctctgagtgttctaagagtcagaatcccctggaatctggctctgatcccctgctccgaatccctgtttaagctctcttcccaatgccctgtttatcctaggtttgaggccccatcttcctcttgctagatacagttaagccagagagacccagatttaaatcctgctctctcattagctgtgtcatcttgcacagagtagcatcagcctcaccgagcctcagtttcctcatctgtaaaatggaggtaataccagtcccgtcatcatccagttgctgtgaggattaaatgaattgctgagttgccgcacacaaagcatctggtccagttcctggcacagagtgagggttcagtttattttcattccttttctctttaatccagttgtacaaagaggcagagctgtcccatttgaccagagaattttacttctgtagctctttaaattctctccccgccatgtacatatgggcttagctaagtattttgagatcacagtgtatttaggggaaagtccttttggctacagctaaaattaggcctctcttgtgctcctctgtttaccaccccccttcctattttaactaattagaggcattgacactaagaaacacttaagaaaagttggaagaacagctgggagttgttctagatacaagcagctgctccctgtcagcatgcaggcacagaaaaggatgatcctgaatggggaagtgcagggagggcacctcagagatgaagatgaggaatggcaaagtctgtctatgttgtggcaaactgagcagggtggagttcttatcactctgtcctctaccttctgctgagagaaaaggggggtcagagataccaaagcagatagaggaaaggggggcaagaaaggggaagggaaggaaggtattcaggagcttagctagttggttagttgattactttatgcagaccactgtcgcccccacctagaccactgcggtatctcctaactggtctcatgctgccggctgctttcctgctggaaccagagacgtcacaggaacatgcaattcttgcaccctgaaatccccgcgacgagcttccaccatggaatttagacagaattccaaaacccatcacatggcccccgagtacctggatgcaccttccccctgttccccgtaattgttactgctcagtcctgctggcttctgttcattcgctctgcttcaaaggactttctctcctggagccagattgcctgagtttaatccaggtttccctactcgctactactacttacaggcctctccatctcccttccagccttaaacacctactgagctcccctggaattccctgtccacgtcctacacactctcctcatggagtccccgggcctgtgcacccccaaataaaagtttctgtgtttccagatggccatggtgactgtgcataaagcctagcaaatgtgcatcaagccagaagacacgagacctttccaaagggctcatgtcttctggcctgatgcacatttttgtgtcccctgccccatctcctcctcactaccctcgggaaactgggtgatgtctctgtgggaagggctgagcctcaggctctgtattgattgtccagtgctgcatttaaacttcctgactggatattcagaacttatgctgttgttttgttttgttttgttttgtttttttgttttgttttgttttttaaagcaagcaccttcacatctcaggtgtaaatgccagatcttctaacacttacaaggacaaattcatttcttactaaatagtcaagcttaaaacccacatgactggctgatgtaagctttggccttgtctgtgaggaatttttgcaacattatttctcttgatttctttctttgttgctgctgttctcagaacaaggcaaggctgaggttctccttctcagttactccatgtccctgaattaagccctgtgagatctaaaaacaggagctctgtgcacacagccgtaaggacaaaccctcactctgcatccccctaagtgggccacatgcctaagcccagaaatctaagagttacttctaacaactttctctccctaacaccctcatctggtctgtcactgaagcatgttttctgcctcctgagcatctctcatatctgggtgataagagagccaccttgatgtcccctggcccttgctgacctcagcagagcctttgggtgacagtagctctggcttcccagggcccttggaaaggagactgtggggtccgcgtggtatggccctgcctgcctcttggttctgtttcacccacacttcccttcactcttatctgctccaacaacacagcctttctcattcctcaagtatcagttttcttttctttttctttttatttatttcagtagggttttggggaacaggtgttgtatggttacatgaataagttcttttctgagacagggtcttgctctggtgaccagactggagtgcagtggtaccataacagctcactgcagccttgacctcctgggctcacgtgatcctcccatctcacctcccaggtagctgggaccgcaggcgtgcaccgccacacccagctaattttttgtgtttttttgtagagacggggttttgccacattggccagactgatctagaactcctggctcaagcaatccacccaccttggcctcccagagttctgggattacaggcgtgagtcaagtgtcatttttcgtccttccgtatggccctctcctctgctagacacatgcttccccctccttcagccattaatacctgtgcatcccttgaatctcagctaagctatgacatacatgaagcatacatgcatatagacacagacatacataccattcaacctaacatgaggtgattgaggaatgccgagaccctcctctcccctctcagtgccctgaagcagcccctgggggaggggatggccctggtccctctgactctgacagggactgccctcccacagagagaggaaggcctcgggagctggttgtgggctcacctctgtggtactgctcttcctcctgcttctgagcagagaaggcctgggggccaaggtgcccaggggctgtggacaagatccttttatgctctgtccttgcctctaatgtgacagattattttgtaattacctggcagagataagtttggtttctgcaaataaactagcaaagattccaaggttattaaacacaaccttgcctcatctatctggtcatatccaaaaaccttaaaagaatttttgttcttctgaatttcactctccaaggcacaaagaccaggtgatggtggggcaggggtagagagagggatgggaagacttctcacagtgattcgagaacgttcacacacacatacgcacacaaaaaccttcactctccccctctccaaccccaccccactgactgcacacatgtcttggcccccttgagaatcccttttccatagacaagccctctgaggtaagaggtttaggcctccttcctgctttagttaacatcttgtctccacagaaccacatccaaccttccatttttctccaacctctttagctcatgaggaagatttacagcctgggagtcaggaggcccaagttctagtccttgctttgacaccaggtgatattgtggtcttctctgagtattgttggttcactcttatgagagcattctcagacctgtggcattttcaccattgaatccactgtgcacagaggtaaccaacatttgtgacacctgctgtttgcaaaacactgagctaagaattagtgattacttctcaacccaccatctctacaaggcagctatgactcctgttttatctatttatgaaggaagacagagcttagcaaaattaagaatgctgctcagacccacaaacaggtaagattagaggcaggtttcaaaacgaggtctctgtctccagagtttctgccatcacagtaagctgagtctcaactgtactatagaaaaataaatcaaaatgacattttaagtatcatctcttttatttatgcattatgcaggagatggaactcctttcttagatttttttcccccaaatatgctgtgctcaggagctgggaaaagggaaaacacacaccctgggaccttacaccctgatatggtttggctgtgtccccacccaaatctcattttgaattcccccatgttgtgggagagacccagtgggaggtaactgaatcatgggggcaggtctttcccatgctgttctcatgatagctgataactctcacaagatctgacagtattataagggggaatttccctgcacaagctctctctcttttttttgcctgctgccatccatgtaaggtgtgacttgctcctccttgccttctgccatgattgtgaggcctcccagccatatggaactgtgagtccaattaaacctctttcttttgtaaaatgcccagtttgggatatgtctttatcagcagcgtgaaaatagactaatatagtaaattggcaccgggagtggggcactgctgaaacgatacccaaaaatgtggaattgactttggaacttggtaacaggcagaggttggaacagtttggagggctcagaagataggaaaatgtgggaaaatttggaactccctagagacttgttgaatggctttgcccaaaatcctgatagtgatatgaacaataaagtccaagctgaagtggtctcagatagaaatgaggaacttgttgggaactggagcaaaggtgactcttgttacgtttcagcaaagagactagcggcattttgcccaagccctagatatttatggaactttgaacttgagagagatgatttagggtatctggcggaagaaatttctaagcagcaaagcattgaggaggtgacttgggtgctgttgacggcattcagtttcaaaaggaaaacggagcatgaaagtttgcaaaatttgcagcctgacaatgcaatagaaaagaaaacctcgttttctgaggaggaagtcaagccagctgcagaaatgtgtataagtaacaaggagccgaacgttaatccccaagacaatggggaaaatgtctccaggccatgtcagaggtcttcatggcagctcctcccatcacaggcctggaggcttaggaggaaaaagtggttttgtaggcagggcccagggtacccctgctgtgtgcagcctcaagacttggtgccctgaatcccagctgctccagccatggctgaaaggggccaacatagagctcaggccatggcttctaaaggcgcaagcctcaagccttggcagcttccacatgatgttgagctggcaagtgcacagaagtcaagaactggggtttaagaacctctacctagatttcagaggatgtatggaaatgcctggatgtccaggcagaagtttgctgcagggacagggtcctcttggagaacctctgctagggcagtgtggaagggaaatgtggggttggagtcccagcccagagtccctactggggcaccgtctagtggagctgtgagaagagggcactgacctccagaccccagaatggtagatccactgacagcttacaccatgtgcctgaaaaagctgtaaacactcaacaccagcccatgaaagcatctgggagggaggttgtaccctgcagatccaaagcggcagagctgcccaagaccatgggagcccacctcttgtatcagtgtgacctggatgtgagacatggagtcaaaggagatcattttgtagttttaagatttgactgcctcactggattttggactagcatggggcctgtagcccctttgttttggccaatttctcccatttggaatggctgtatttacccaatgcctgtacccccattgtatctgggaagtaactaacttgctttcgattttgcaggctcataggcagaagggacttacctttgtctcagaggtgacgctggactgtggacttttgagttaatgccaaaacgagttaagactttgagggacttttgggaaggcatgattagttttgaaatgtgaggacatgtgatttgggaggggccaggggcagaatgatatggtttgactgtgttcccacccacatctcaccttgaattcctccatgtcgtgggagggacccagtgggaagtaattgaatcatgggggcgagagcaaactgaggaccagagtggttataaaacttgtctgaattcataccatttacaaagtaaaagaagagtctagagcccaggtctcctgagtcctcagaatcaaccaagtcaaataagctcccctattcaaaaagaagaaccttcaagaatattaattttgtgcccatctaaaagcctcactgagctgtgctaaaggtaataggcattgaagaaaacgttctcacagaaactcccagctgcaaacacaaagaagcagctctccagggaacagggtaaggattgtctgaagagatctatgctggtgagattacaaaaatcataatatatgaataaatgaacatatggaaggaatcagcaaagccctctcattcttcccgtatgtaaactcggcctttgcctaaagtcattaagtaaacacagatgcagccaaaccaggcaccagatggcaaacaagaattggaataaaaggtaaagaaagcttttggtgtttactcaaagatggggaaaaaaaccatgatccaaaatgctgtggtttccccagaatggccacctggagtcaccagggcccaaaagtgaccaaataaaacaaaacaaaactagaataatcatgattgggaagttgtaggaaaaccgctgctatcttctgtgaatggaatcccatgtcagaagaaactggttattctgggaaatgaaataaatggttaaatcaaagtactaggaccagagagcaacaggaatgtggcaagaatccacttttgctgggcactcacatctgtccagagctttgtattcttggccttatataatcctcacaattacccattaggtattggccaaattttataaatgaggaaattccataaatgggttgagagagattaggccccaaggtcacaccacaggaatgccatcctagctgtggccagtgcttctttgtccattcccagcttcgtagctctgatttcagtaccagatacaggggaatccaggcacattctctctgcctttcctgcccaaaccactggacctaagtaagaaggtcacctggtcaggtactgccttgaagggagaccagaacagacatggagtggggaacagagcattcctgaaaacttaacttcacctttatttcacaaaagacacccttgcacatgcctcatccacctcttagcttgtacatttgccatgagcaccagtaatgaaggcagtccttgtgaatatttgcttttcagtatgcatgagtttatatattgggggtagaaaattccaataatgtttcagcttcaactaaaagctgtatcttgttctgtccttgcctctaacctgacagattattttttaattgcttggtagagataagtttggcttctgcaaataaactagcaaacatttcctgcccaggctaccaaacacagcctcacctcacctatctggccatatgtaaaaacgttcattcaaataagttttgttcttttgagttttactctcccaagcgcagaaactgggtagtgaggggtgcaggggtatggggagaatggtttcaaccaaaccattcattgcttgcaggtgggaaggtaaggtggaaaatgctttccagctaaacagacctgtctgataaccctaccactaactaaacttgctctcttgggcaggccacattatgctttgagttttagtttctttctctctaaaatgtacgtggaagggctgttttcagaatttttttttcactttcctcttacccatcttctctttttctacatggtcaatctccacgtggctgttttattttttccccattgttctttagcaaagcttaatccaggatgaattcagctttgtggacactataaatcaaagccatacaaccataaggcaggcttctaccactctatactaattgttaccagtctcttagccctggtttctggttgggtttggccaatgggcagccccagcaggaacctggagaataatgaagttgtttattcccccagcgctctccttgctgggttgacgcaggttagctacatccatctaccatccttctacaatggaccacagttcctgtgtgtggccctttccctacaattttgtgcatgatgggaacctctcctccctccctgtcctccttcaggctaagaggttgtaatggctccttactgttggtaatcattaggtacttgtttctttacctaaacctttttaaacaactcttcttgaagcttacttcagttacccaatgtgagtgtcaatctctttcctaataggaacctgaataaatatatcacttcagctcaatttcccattttctacaatgactattatcaaactttgccaatttccatccctgtctttcctctcatgttcagagagatgacctcctgtttattcttagccaccaactacctctaagagaaaagccattagaaagacaactgccattaaatctcccagctttcttagatccggtagtgagctggggctagctcagccctgctcgcaagagcatattgtgcacatctcttcccagcttcacatccattccatcacattcagagcttgaaactggccaagatggaagtatttacaacacagaaattggcaattgataaaattagggctttctattgattatttatcagtattatttatcaacacaccactgcttatatccagatacagtctttttctccttcacatttgttacgatgaaagagatggcccacttattatcagagactctttcatctcctactgcctctaacagcccacttaattcattatccattcactctatgtttagcttcttcaatactatctccttctcatcaacatttaaacatgctctagacctgtgctatccaacagtagccattagttaaacgtatttattgaacccgcgagatgtggctagtccaaattgcaatatgtaagatacacaccagatttcaaacattttgcatgaataaaagaatgtaaaatatctcataaataatttttgtattgattacttgaaatgatatttggggtataataggttaaataaaaacatattaaaattaaattcaccagttcacttacacttttttaagtgggtactagaaaatttaaaattacttgtgtaaatcatattatttctgttggacagtgctgctgtaaacctttcatcttaaaaataaaatccctggctgggcacagtggctcacacctgtaatcccagcactttgggaggtttggatctgtgtccctggctaaatctcatgttgaattgtaatccccagtgaggagggccctggtgggaggtgattggattttgggggtggagctcatgaatggtttagcaccatccccccattggtaccacatagtgagttctcaggagatctggttgtttaaaggtgtgtagtacctccctccacttcctcccgctccagccatgtaagacgtgcttgccttctgtcatgattgtaagtttcctgaggtcttctcagaagcagaggccactatgcttcctgtatagcctgcagaaccatgggccaattaaacctcttttcttcataaattacccagtctcaggtatttctttatagcagtgcgagaacaagctaaagcaggaagattgcttgaggccagaaattcaagaccaacctgggtaacatagtgagacactttctctaataataattttttaaaaattgccaggcgggcgaggcgcggtggctgacacactttgggaggccgaggcaggtggatcacaaggtcaggagatcaagaccgtcctggctaacatggtgaaaccccatctctactaaaaaaatacaaaaaaattagccaggcatcatggcaggcacctgtagtcccagctacttgggaggctgaggcaggagaatggcttgaacccggaaggcagagcttgcagtgagccaagatcgtagcactgcactccagcctgggtgacagagtgagactccatctcaaaaaaaaaaaaaaaaaaagccagtcaccgtggtgcatacatgtagtcccagctgctcaggaggctgaggccagagaatcagtttaacccagaagttcgagctgcagtgagctatgatcatgccactgcactccagcctcggtgacagagcaaaaccctgtctcaaaaagtaaagtaaaatcccttcttctgcctatcagctcccctagctgttgcctctcatggtcaaggatgctttaaaaggtatctatcctcactaccatgatttttctcaccaccacccctgcctccttaactaaggcagatcttccttccgctacagaaattccaccaaaatcatgctgcctcagtcattagtgctgacccaaggcattgctgagcccaaagggcttttcaacccctactcagctttagccttggcaacattttgcaaagtggagcactcccttcattgaaacacgcttccactgacaacatattttcttgatttccctcccgctgttctgaatgtttctgcacaaattccttttctagttttcctttctcctctccccaatattatatggtagtcttatacaggaatctgtccatctcatctacttctaaggattcatttactatttatatgccagcaggtttacacctatctatataacatcttcacttaaagggcttacagccatctcaatctaagcatattaaaatctgaacccaccatctccacctctgcctgaaaaattggcactgttcccatacgtggcactatcaataaatggcaccacgtgtccttactcactcctggcagaacctcaaggacattctgagcccactctgtctttctgctccacatcagtctctcatggtgtctttctaaattacatttcatgtctcttgaattcttccactttgctttaattctaccatcaccatccttttgtctcacctggactgctccaaagaacttttgaatggtttccttgcctccacttttaccattctttagtttattctctacaaaactaccagagtgatctttaacaaacatgaataagatcactcttgcttaaaactctccagtggcttctccttgactttggcataactcaaaaccttttaacatgatttacaggaccatccaaaatctgacccctgccttcatctatagcttcatctcctatatgctttcccttcattttatccagtcatcttggacttctttaggtcctttaaatgtatcatgttgtctttacttaaggccttcagatatgcatttccttcagtctggaaccttcctcatcaactttctttacccagccaactccttgtcaaccttcagctagttccataagtttccatagtagttttgtcttcctcttcctgtctcccatgatcaccgatgtttctccagcaggctttaaacttcatgaggtcagggatcagagctgtctggttgcctcctctatccatattgtgtagcacaatgccttgcacacaataagtactcaataagtatttggttgcacaataaaaatgacattatctggctcaaacttcccattttgagaaagaggaaactgggatccaaagaaaggaagcaacttattcaaaacaacagagcccaggctaagattaatacagggctggagcctcctaatttccagatcttttttttttttttccagcacatcatgtgcctatctataatatggtaaccagaaggaagcagactggattccctgtgtcttgtaaaagccggagcaagttcttatttgtaaacacagctgacatagttgttttctttgtttgttttaagtaaaaggactggaagtacaacccaaaaataaactttgtgtttccaaaccaagaagcttctacaacttttatcccctgcagcctcctttctgtccattgttcatcttccttcccttcattaaccacaggcatcagctgatattcaatgttgaatggtccctgcattctgtgttctttatcactcccctgcccaggcagcatgtcacatgcagcagcagattaggaagtgctgtctttaaatagtatcactcaagagaacattacaagatcctgtgtagcgctggggtggagattgatgtaataatttttagaataaaaataactcacatttttgaaactattagtttgtgactggcactaatttcagtggtttgtatgcattttcttttttaactttatgagtaattatttctattacttctattttacagatgagtaaactgagggacaaagaggttagttaaggcccaagccattctgttttgtttgagacagagtctccctctgtcatccaggctggagtgcagtggcacgatctcggctcactgcaacctccgccttctggattcaagcgattctcctgcctcagcctcccaagtagctgggattacaggcacctgccaccacacccagctaatttgtgtattttcagtagagacagggtttcaccatgttggccaggctggtctcgaacccctgaccttagatgatccacccgcctcagccttccaaagtgctgggattacaggcgtgagccactgcgcccggcccacccaagccattctgttagctagtgaaagagtcaaagttctaatctagccagtctagagcctgtgatcctaactgtctgacatcggacaatgaagaatgtgttgacctggcaggaaataccaaaaagtacaactgagggagatcctaaacttgctttatacagatatcctggatcctacccctgattcattcattaattcattaatccatttactcattcatttaattctttcaacatgtatttattacatttttgcattatttatatcaattttggggaatacagagaaagttaatggcttctaccctttgacatctcacagtccagtggggagacgtaagaaaacagacatttatcctactgtgtgctgaatgataagacagaggaaaatcagtgagctttgggaacatggaagagattataaacacataataaagagagtttaaaagggcactacagtgatttgctttggacctgcattccacacctgtcactctatctgtctgacctctgctctctctatgctcctggcttctagcccttctcttactttggtaccatccttagcctctcaactcctggcttcagattcgatgtctttgcttgtctttttcctctggaagttggtttggaatggattctggcttggctagagggtttctgtatcgtaaacagtctaaggccagctccaaagtctaggccagaatatctaggccccactaccaaaatggctctcgcttagaagaattggagatccaaaagcagggaacttgaaagagcatggagggatagatggatggatagattccttgcctcttagcttcgattattcacctgcctaaacccagagcagttggcctagtgactaaccaacatcccttgcagctcaatcattattcattatgttaatattatcacacattttgattctttgctgtcgatttggttgctgatctgctggccaaaggatcatcatgggaaggaattactattgaagcaggcagtgcaaatttcaaaagtgttcagaccctgcggcctttcatgatatttcactttcttgagttgcagtctcccattggcctgctccttccgaagcagattttgtcccttgtagccataagtgaagcatatcctggctaaatgtttctgtggactgaaggtagctattgaattgggcagttaagagaatattgcagattcttgtcggtaaatgacacaaaagatgatggactctaagctagctatggaagaaattagagccagacagggcacatgaattgaaagaaaatgaagtgatggagattctggaagttgctttaaagtggagaaggacatttgctaagaatgatagagtacatgagagaattggactgaagggcaatggaattcagaaagtggctgttggtatattgtaatattcataagtatagcagtctcaaggggggctgtgggagtattgaagtgaaatggagatgaaggtcccggaggtggaaacattttgaaaccgtctaacagtggaacattggatgggtcttatgagcagatgctgaagttgtccaggacaatgataaacctccaggtagatagggaggcttgtgatctaggagccttagcctcatttaacatagggacagaaacaagaggctgacagtgacagcagtgagatgcaggggagacatgtgtcattgtatctccatcattaggtggcataaacctcagaggaacaggcttttttgcctgcaactgcaggaatacttgtctggaaatgataatgaggaggcctgagaataatgactgttatcaccttccccaacccacctgaaacatacacacatggcaacacttacctttcaataaagtttctgggaaaataaagtttatttcagttgataggtacatagtaataataacaatatctgcacttttaagcatttagtccatccaataggcctataaaataggtattaaaacttccctttttttgagacagcatcttactgtgtcgcccaggctggagagcagtggcacaatcgaggttcacttcagcctcaacctcccagactcaagggatcctcctatctcagtcagccttctgagtagctgggcctacaaacacgtaccatcacacctggctaatttttattttatgtttttgttgagatagggtttccctatcttgcccaggctggtttcaaactcgtttcaagcgatcctcccacctcagcctcccaaagtgctgggattacaggtgtgaatcactgcatccagcctaaaatttccatttttaaaatgaggaaattgagactcaggatgttcatggcagaactagggtttggattatgatctaaatatcactgaagtctttgtttcacagcaaatgtttaaaagtataggttccaaagccatatgttttcttgtctttgaactgggaatacaaactaggtaacgtatttaataatatagtgctaggccatagtaagtactcaacaaatatcagttgccattataattattgttattgagttactattatttaattacagctcacggcagtactatataccttctcagcctcacatatcagcaagatcatatttttttccagtcaacaatagattattagatgagtgacagcttgcagttttggaacctatcatctgtctgatgcttttagcaagaagcttcctatttttactttgagaaatccataagaagtaagtcaaactcatgtagatgggatgaatacttgctccctattcatgtttggatccaactcttttgcagccaggccatatattaggaccccatctcagagtatcacaacagaggttgatggccttacctagtataaaaccactcccctgtgccgtatttgcccatgactgaatcggaatgaaactttcccttgctaggaaaacactgtgggtatattctctgtcggagtgtgctgagcaaaaccctaatagaatgtaccgtgaggaataaggagtaacttgtcaactgagagttaatcagaaaaccacatgtgcacaaaaccaacagattgcagagctggcaaagacttcagagataatttactccaaccccctcattctactgataaagaaagtgagtcccagggaggggaagggtcttgctcagggtcatacagctggcagtaattttgtttgtttcaataattaatatgaacagtcattctatacatcagtgaatccaccttcctgcctttgtaagcacaatataatgaccataattgaatttgtctttgacagtgaagaaagcaggcttttagggctttacagggccccaaagtcatcagaagaaaataaattgtcatgaactaaagctggagatctgcctgttgactgtgagcttcttaaggaatgggcctggtcttattcatgagctaaagcaagtttcaaatcctggcttagccctttactagcttaagcaagtacttaacctctctgagcctttatttcctcattgtaaatttaaataataagaccttcctcagagactgttagtgaggatcaagggaggcaagatctgtataccagtaccttgcgtaaaataggcattcaataaacttgcactttcaccttacatttaacaaatgtcctgctaaaagctagggatacttcaaagaaaggaaagccaacgactccactttcatggagcttagattcaggagggaggagagcagaggtgaggaccacagagaagcaggcagacaataaacaattaaaaatataatttcagatgatgatgtgctatcaagggttatgaggaaaagaaaatgagatgatgtcatagatgtttaggagagtgcactgcttctgctaagagtggccaagggcagtcttttcaatattatgtttgaagagaacctaaatcatatggaaaaagccagacagtcaaagatcctggagaagaccattcctgagagattcagaaaggccttaggcaggaggaaggttggcatgttcagccagcagcaagatggccagtgtgttcccagcatggccagcccagtaagcagggcatgagatgagactggagacatctgcataaactccatcctgaagttctagtccaccctatgacatttgagttttattcaaaaagcgatggaacactgttgcaaggacgtgttaaaaaataaatattggtctttgtccctagttcctggcacacagcttctaaaattcttggaatccctgctaaaagctagggatacttcaaagaaaggaaagccaaggacttcacttttatggagcttagattaagctccatgtgtatggtaatgagatgactgatggctgagaacccctccgtagcatcaggatgggggctggtcaccagaaagaccaaggcatgattagagggttgaactttcagcccctcccctgaccttccagaatgagaaaggggctagagattgagtcaatcaccgatggccaatgatttactcaattatacctaagtaatgaaaccttcataaaaacccctaaatgatggggtttagacagcttctggattggtgaacacagggaggtattgagaggatggcatgcctggaggaggcatggaagctcactgcaccactgcacctccctcccctcataccttgctctatgtatctcttccatttggctgttcctgaattttatcctttataataaactggtaatagtaagtcaaccgttgtcttgaactccataagccgattctagcaaattatcaagccttggggggtggagtttgtggaaacctccaatttgcggtcagttggtcagaaatacaggagacccaggacttgtgattggcatctgaagtgtgggcagtcttgctggactgagccctgaagctgtggggtctgacactaactaactggggtcagtgtcagaattgaatcaaatttaattataagtcatgcaattggtggcaggagagttggagaattggtgagtgtgaggaaaaaacccatacatttggtgtcaggagtgttgtaggtaaaaacagcccagagaggtaaaatcattcattgattcatttaacaaatccttatagattaactattctggccaggcacagttcttggtgtggtgcatgaatccaatacacacccctggccacatggagcttgcatgctaaagggataataaatatctaaagtttatgtagcatttactatatgctggcattgttgtgttttacctcaaataactcacgtgcttctcatagcagtcctatgaaaggcatatttttatccccattttctgatgaggcaacaggcatgaagaaattaagtaattattccgtgattatacagctagtaaatgtaaaaatccagtttcaaattctggcagtctgttatagtcagtctgtattttaatcactgccctttattttctctgcttctgaaaaatcacctagactggtcctgactgctataaggggaaccaaagtggaagtcaagagaccagttaggcagtagtggtcagagaatgggatactggaattttcaacaacactgagtagatattattattcccacttaataaatgggaaaactgagctttgattcacacatctgataagtagcagagcctggatccaaccccaagcccatttatctctaaaacccagtatctttctgctaatgcctccatttcctacagaattataaagcttccactcctcccctcctttatgaccaagagaccaatttgaggtatgttttagagtcaaaattagaggactgggcgtctaaaaatttttttttctcttggtaggcatttttataattgaaaataaaataaaatataaatatactgacatgcagttctgttttctcattttcttttgcaaactttaaattgagatatagtacacataaggtgaaatacaaagatattaatgtacagcttgatgaattttgatgaagtatacacccatatagtcaacactctaaagatatgtaaatgtgtgcacatagtgtacttaaaattataaatgaggtgccagttttcatatcatgagtaatgataaagacctctcccactctctttttctctcatcccttcctgcttctcaattgatatttttgtctccaattcatgggggttacacagaataccaggtgcaggtcaaaagatgactgtgtcaaaaggaaaagaaagcaaaataaataagagaacaactagccatttcttaatgcgtgttgaaggaaagtcacattgatatattttctgtttttctatggaggggtcacgtgcctcagcccacacattagcatgtgaacttgttgttccagtcaaatgagtcagagttcctcaggaaggcagattcctgtattttagagctatgtgtcagcatctgtaaaaaaaaaaaaggtacagtgtcctgtattgatgcatctcactgatacacacgtgctcgtctcactccaggtaatcacacctgctaataagcagcagaagtaggatttgaactccagcctagggcactcaagaatcaggctgttttcatgacagggagaatggtaccactgagtccgaatgtagggtttgcaatggcctggagtcagaagtgggcttgaattctggttttactacataatggctttatgaccttgggaaaattacttatattctctctattttcagttcctttattcacaaagtggtgatagatgatctgtgtcctaatgtccttttgagggttaaaaagatcatgtacttaaaataatcagcacagcacagagtacaaagcttaaaccagtaaaatggcaatggcagtggtagtcggcccctaagtcaacagacaccacagtgttttttaaccatatacccccatcagttaaaataaattttgagtatgcatcctcagtacatgaaaacctatttatgaaaaagcatgatgtgctatactgtgttcatagattatttactctataaaacaagtgaaatatagctgaaccaaagtatttccaatgtgtttacctgtcatgatggcttcatgctaatattagcaacatgtaaaagtacactatatgtctatggccaggtgtgtttttaataattttaaaatgatttttgatgatttttaaatgattttgtatgtgcctatgtatcgaaatctaaggcaatcttcttgataattttgattattttcccaatccttgtcttatttgactaggtcttcattgtttttaccttacaatatgaggagctagtactgagtaaatacatcaccattttcttgtttacttgaatctgaatggtgaactggtgataattatctccatcacgtgcaaatccattgactgaatcttttttagctgcttgtccattttgtgagggttagtttaaactagttaatacctattaatcactaacctggaacatgcaaacgacaacatgtagcaattctggaagctgaggacatataagggagtgccatagggccatccctggagttggagagctcccactctcctcacaagaacctcacacatcttatgtgactcatgactgactgatgtgtggccaaactgataaattgtctagtaacaatccatatattaaatgctggtaaagtgtaattaatttcttaagaccaaaaaaagtcatataaatggcacttccagtattttcttctggaatcttaatgagaattccctggagtttatggatgccacttaagaaacactgccatcactttttcctttggcaactctgcaaacactaaccaagcacctgtaagtgctaggactgtgctagacattaggcctacagtgatgtgatttctgccttctgggagttcatatatagcttgtttccaccacactaagttctgctatattctcccctatagatggtgactctggaattgcccagcttgcagtgccctgtagtaccttgggctagactactgacagtcttccccaaaaggcttaagcccattattccccttcctcagggtaggggagaaggtactagatcttctgctcccaaaattgccaacatcagtaagtctaccactcatggaatccacatcttttccaagggtactgaagaacccatggcttcctttaacctcatttccctggtaactcactccaacatggcctacagccctttggtagctcccaggccaggtcattacagtgagaattgggtgtttcccctggccacatgcaggcctggctgttgccagtgctgccacaagagaagtggtgagcagtgtgtgctgattagtatctcagcctcgacacaccagggaagggtcaaacccatgaatgcagtctttcatggccgtggtacagggcccctattttttcctccagaaacccttcacttgctttcagaagtgatgatcaaatgtgaactttcatggtttatttatagctctgccttatagagagaaagaaaagaagtgattaaaatgctattttacaaaatattttgtttttaaaaagctttcattgtgtgggcaaaaggaaaaagaaaagtcactgtattaattgtgctgtctagactctcaaacaaagagggtagcgtgctgcaaattaagattgtccggctcctgcctgctgacaaaaagtatgaatttggaggccaacttcaaataaaccctttggaacagaaatatattgtgggggtgactatatttagcatgtgtcagcatttccatactaaattcatattgttatgttgtggtaatttcagatttcctgcagccaagtgggatcatgagatttcagttttatgttaattatttggagaaattgaaaaactcagcagtgctgtttctgatgacagcactgattctcagggtattctccacgttgtgtcagggacccataatgagccctgcctttcaggaaaggggaaggtgagcccgagtcattttgactgtctttataagcataactttaaatatatatatatatatatatatatatatatatatatatatatatatggcattacatgttttccctacaaatacaaaattaatatatgccactgtagaaaatttagaaaacacaataagcaacttgacaagaaaaaaaaattgttacccatgctatccaacctgttaacattttaatatatattgatccgatctttattatgcatatataacttgtttttatatgcatatcttgtttttaacttgtttttaacaagttatatggagcaaacaaaaaattatgtagcacaaacatgattattgagatagaatacaaaattataactttattttctattctcattatccctttgcatttgtgcagtagagctagtttttccctgctctggttaaaaatcctggtggttccattacttttttagataaatataaagtcacttagataatataacctttatggtcctttaagttgtgagatgtagccaaaattcagaaattcaaatatcaaagaatatgtaaaggtaaaggtaagatgttttccagttcttccagctggagtctgccagaaacgagacatagccctaatcagattcttctttcttcctcattcactttctctccaacatattagcttttttcttgttcctctgaaatggttagaaagtataagggaagaaaagttagtggtgtaggaaatttcttatctgatcagtactgtcataatgggcttcatgctctcttagccttataggtgtttacagctagctctgattctcataaggcacatcatagatttttggggagaccccctgcctctgaaaacctctcgcctgaaatattgttgtcttggttaacacctgtctattctcatagattgctcactactcttctcttaattcctcaggaatcctttccttttttttttgttgtttgtttgttttggtctcttttttgtttggttttgttttgagatagagtcttgctctgtctcccaggctggagtgctggagtgcagtggtgcaatctcgattcactgcaacctctgcctcccaggttcaagcaattcttgtgcctcaccctccccgtgggaccacaggcacatgccaccatacttggctaattttgtatttttagtagagacggggtttcactatgttggccaggctggtcttgaattcctgccctcaagtgatccacccaccttggcctcccaaagtgccaggattaaaagcatgaaccactgctcccggcccaacctcatgcttctttatggtgactgctccacctcgttaggtggccatgttggacaggatctgagaacccctggcagctctctcatacatgggccacttggggtctatgggaaacctttgtcttttggatctggacagactctggcagtgctggttgatcccagggtaacctctacttcacttttacactgcagctgtcagccagcctgtctcttccagacaggagtcacatacaagccaccatgtgccacaacctcagggacatgcagcagattctctgctggtctgtgtcttcctgactcctgaagggagaggatctcttcatacttcaccctggaaggaggcctgatgtgcagtaaaccaacagctctttcctaaaaatccatctctgtctgaccttccacatcaatgaaaggtttaagagttgattaatgggtcctcaggcacccttcttgcacattcttcagggtggtctgtttccagttcactttggtatcttatatctgtcatctttagatctcagccaaaacttccattttaacattccgtcacgtgtattatccttaagttcattcattccgtagacattccctgagtgcatacgatatgccagatgccgagtttggcagtgaaaataattataacaattcctgctttaaggcgctcacagtctagttggggaggctgatctgttaacaaaaaaatatggtgccatgtcataaacgctatgatagacggaagcagaagttgctgttggagcacataactcaatataggtgggaggcaggcagcggggatgagtcagaaaaaaatctcagtagagctgatacctgagctaagtttaacatttaaatctgtactttctgagaaacagcataacctctttttaaaccattgaaatctctcttgctgatgtttgcttctcaatttatttttaaaacaagcaaaggtaatgtggagaaaggagggaagaattccctgatgtctgccgtttatgtgcacatctgttgcagtgggaaggaaaataacatttatggagtaccttctataatagaagtttcctggatcccacccatgagggcgatcctggaatgttgtctcaagtgtggggccaaagcacagccaggaggagcattccctgagggcagtttgaagattcagagctggcaatagaaggcaaggtcctccctaaagcacagcagagcacaactcaaggaagagacgaaaaggacaaaataagaatgagtggcacggttgatgatggggattgctgagaccatctcaacaataccccggcttgctctaagggaatcaggacttcgtctttgaaggaaactgttctggggtaagcagagctcttaacatacctctgctaagtggaatggcagcatgttcactaagatgtgtttgaccatttggccctccacaaaatgactccagacagcccttttagtcttcctctttctccatggtttctttgtcaataatttttcttcattaaaaaaaatctcctccctacttaaggctgccatttctttctgttgtcattgtgctggctactcttagcatctctgatctcccaatcagcacattcacatccattgagagctgggaagctagatgtctagttcagaatgcacatgctatccttgtggaagagtccatagagcaacctagcaggagtggaaattcgtgtaagctagcagatgaaagaaccatcaggttacctaacccttgaataactactgaaagaagtttatccgcttctagcgtagtatttatcacactctattttgatcacagtaaatgtcttttccactctatagtgagctctttgatgaaaggcccatgcaatcttcctctctgtattccatgtagattgagtgttatgcttggcacgtgaaagggaggcaatatgttttatgaatagtccaggtgtcgagacttagtagtaaacagacaagtccttgccctgtgtagcttacattccggttagggcaaggagtggagaaggcagacaacgaacacataaaccagtaaatatacaaagtggcagaaggaaattagtggcatgcaaatcagtcaatcagtcacagtaaggtggcaaagatggtcaggggaaacacttggaaatgttttgaagatacccaggggctctcatattctgtatggtattcagattttttttttttttttacattttttcctcccttactagtatgtgagtttctccaggataaagagtatgtcgtatgcaaatctgtatccctagcagagtgtgtggtacatagtaagtgattaataaatgtgtagaataagaagttgtacacatgtgatcccagaatgactgcatccttagcaataggaattcaatagccgttcctaagactgagcctatgctgtagagctttgtcgtgctgttgcttgcaatcttccctggccaggtctgttggactccaaagtttactttctcatggccttaacagccttaggagactgcttaaaaaaacctaacccttctgctcatatgggagccaaaacaatccatggttaatcttgatgctgcacctaccataccatgtctacccagatgctgtaacatgtcatctgcctgagtgccccattgtaaagaaaagaatgtcctgaagtcacattccagaactcaagtcacttagactcagcccggaggtctcagtatgtactcacaacttcagagattgctggaaaaagagctgaagttgaattggagaggtcttaaatattttatcctcaagtacaggtgcgaagtgagttccattccgtgattgctatctttagggaagtagacaatgtactcagcggctggttatgttccctgcttctgccctgtgtccagatagtgaggaggggaaataattcttcccacttacccctggaggcagtcacagaactgctttgccttttgggttgtttatgccccagaggcctcaatacacaagtatttattaagcccaggaggtgtggtcataattgaaactttaaatgttcactgtgttttattcctatttttgtgttttattcttattaccaaagaaaagtaagttgaaaaaaaagaggactaaccaaatatcttaaagggaagcaaattcaaattagaatgttttgcctgtgacaagcctcgctttggatttcgctttccaactcagctgtctatgttgttttccatttaataggaagcaatggcaaaaatgagcaaagttgggaaagttgtgttcccgagactacaggataaaaagtaagtgtgtattttttatatgtacagtgctaaggaagtgagcacatacacacacacatgcaactatagatctggaataaactcaggtggtcaactaatccagtcctttaatttgtggttaagaaaactaagttccagggaggtaatgtcaccttcacttacctaaggctgcagaactatgtagggccagagctgggggtgaatgtaagcttctgaactctcagaccaatgttctttttcccaggtaattggcagcaaatctgctcttctctgttctaaagtagggatctcttatatctccatcaaaggacccagtagaatctgctcattcttttactctttgtatcacttggcatcaaaggctaaaaaatgacattggtcagtattttaatcccaattcaacaaaatattagtttactgaattcctgctatattcaaggcattatgctgggctccaggcaggtgttacaggggaataaaacacaatttaatttaggcacataagattattttagaacaacgggataagttccacaattgaagtattgccaggtgacaaagttgcccaaggaagaaagagatgggagcctgtagagatgagagaatgcttttgggaggaggttatgtccaagctaactttaagctcttgtaagaaattggtagacaggccaaggcaagaaagaacattcatagtagaaggaataacatgtacagttataaaagtgggagcagcatagtacattcaggttactataaacaactcataatccagaaacacaaagtatgagatggggaatggcaggaagtgggactagggaaggatagaattgggtagggggaggtcagctcataaataccttggaggccatgctgaagacctccaacctcatcctataggcagaacagagatgctgaattctaagcagtggtgagatctggtcagatgcagatcagaaaaatccctcttaaaggatccagtacagggggctcagggtagaaatagagggtccagataaaaggctttttcaagaatccaggctagagatgtaaaagacctctattaatttgctggtagtgattttgaagatgaaggggctgttgtggaagtgcttttataattttagggaagtattcgaggttaagacctaaaagcaaattccacttaacatgatgaacaggcaaatgtgcagatcccactgaagcaggatcagtatttaacagaattggaaatgttcatggaaaagcaatccactttcttttcatttcctttaactccacatagagtcaggctgctaaccctccgaatataaacccttctctaaaggccagggtggaaggtacaggcattgcgtaggggagctccatgcaggaaggtggagagatctgagttcccactggcagtaggagctatgggctgctgtccctgtttctgttccctggaggcagctggagcatccctctttttgtgaaattagaaagattgtctttctccatctcttccctgaccctcccaagacttttcagggaagtttttaagttttttccgtaaaccccacgtgttcagagagtcctccgctgcttgctgggagctggcagctggcagctgttctctgcgaaggaggcggcacacacggtgctttagcaccatctgcaggcaacccagagatttgcaaggagacaggagaagccagtttccttctgagccaacctcatctcattgcctaatagatcacactgttaacgatgtgggacgacatttacttaggcctctgccacacagaagcagggactgagttgaggcacattttgaagagaggggattcagctgattttaaaattcacagtcacggagagtgtaatttagtgactatagtttaataataaatgtttaggatgaccccaaattgcattattatgttcagtccaaatttatatgtggctctggaagagtcacttaaatgtgctttgagaaatttggtgcattgaaagacactatcaacagagtaaaaaggcaactcacagaatgggagaaaacatttgcttatcatacatccagtaagggattgatatccagaatatataaatgtataaagaactcctaaaactcaacaacaacaaaaaagcaaaaacaacccaattcaaaagtgggcaaaggacttgaatgaatatttccccaaagaagatttataaatgaccagtaagcacgtgatagggtattcaacagcactattaggaaaatcaaaactaccgtgaggtaccacctcacacattaggatgctactattttaaaacagaaaacaacaaatgttggcaaggatgtggagaaattggaagctctgtgcatagttggtgagaatgtaacatagtatcgctgctgcagaaaacactatggccattcttcaagaaattaagaatagaattaacatgtgattcaggaattgtatttctgagtatatacccaaaagaactgaaagtagggtatggaagagatatttctacattcatgttcacagcaacattattcatgatagcgaaaatcatgagagcaacctaagtgttcattagtagatgaacatataaatgaagaatgatatgtgcatacaatggagtattattcagccttagaaagaagcaatttctgacatgccacacatcagtgaaccttgaggatattattctaagtgaaataagataaccacaaaaagacaaatactgcatgattccacctatgtaaagaataaggccagtgcacaaagttgtggcaaagttgtcagtattaacattgtaaatcaagtgtgtgtgaaggggtgctcaccttagctcccttctagatattttgagattctaaagtcaagaaatctatctcatgtagtgaaagaattccttaccgttatattgtcacagagcatcattagtaggagcaaattgttcctaaaataattctacaactaataaatttggatgctcatagagtaggtcttagtagtacctacatatagctatattgatgatattaaaatattaattatctaaaatttagtaactagcatttatatcacttattatgagtcaggtactgttctaaatgcttttcatttatttccacatttaatctacaacagctctgctgaagtagatcccataattatccccatttacagatggagaaatttaggcagaaatagtttaagtaacatatccaaagtcacacagctaatgttaggccacattaagattccaacccaggctttggagttcgccttttaaccctgtgcttggccccgtcacaactcctacgttaccagaatgcttacagtctaataaatattgggtaggggactcctactaacatagctatgtgtgacaagtagaagtccctgtgtgtatccaaggttactcttacaacctctctctgccaatgcacaactttgcaccaaaatttcatcatgaggactccttttcagagcaccccagaattgagcaagacatgctaaactggcttcttcaccccctcaccccatgtcagcttcccaaccaagaggagtaaggacaaagttgcaaggctgcaagtataatttgtctcggttcctattattcctttcaggattatgatgccagagcagcttcagctgttctgctgtctgattcatggccaataccagttctaacaggtctaacccaaagagtcagccagataggacagggagagcaacggccactgtgagatgtctggaaggcgagcacagctctagaaaaggcattagctacatttccatggggttttgctcctggataaagcaggtcacaagggaaacctagatgtggaatctgcaaaagggcaattaaaatgttcagtctttgtccttggtcaggctgtgattttaggccagtcatcaaacctggggctagttatataggaaatacttattgaagctggcaatgtgaaagagtctccattaagtccggcctttttgtatatacagtagaagctttgaagtcagacagacatgagtttgaattccagctctgccagtttttatctatactactttgtatatgcctctcatttaggaatttttttttttttttttttgatggagtctggctctttcacccaggctggagcgaagtggtgcaactcaaccacttcacagtgaacgggggacggttcactgcaacctccgccccccgggttcaagcaattctcctgcctcagcctcctgagtagctgggattacaggcgtccaccaccatgtctggctaatttttgtatttttaagagatggggtttaaatgttcttatttctaaattggagataataaaacttcatccaggtcacatataataggtctgaaacatgctaattcattgcccaggatgctgtaagcattcagaatctaggtgtcagcatcaccaccacacatatatttccattcttctaaatgtacagggaagccctgtggcagttttgtcttgagatcattcaacatatttatatttctcccacagatactatgataagaaataccaagtattcctgaagctggttgaacaccagaaggagtatttggcgatcatgaatgatgactgaacagggcttgcaggtgctgatgccagaagcttctgtgccattgcattaaagacttgtcatttgatccatgttcaagacccttgaggtattgtttcatcatttctgtattgtctttcaataaagaaaacaaacatgtgcaaccagaattagagtcttcatttcaaaataccgctattatttagtttcagtttccatacagtctccattatagtaacagaagtttcacatagggtcataggatctcacatgagactagaccttgggggctattcaatccagggaaggcctgtacttttttttttttttttttgagacggagtctcgctctatcgcccaggctggagttcagtggagcgatctcggctcactgcaaaccccgcctcccaggttcacaccattctcctgcctcagcctcctgagtagctgggactacaggcgcccgccaccgcgcctggctaattttttgtatttttagtagagacagggtttcaccatgttagccaggatggtctcgatctcctgacctcgtgatctttccgcctcggcctcccaaagtgctgagattacaggcatgagccactgcgcccggccaggcctgtactttttaatcaattaaatgtcagctattaaatgaaaaacttacattactttaggtaggacatctaatgcatagtcgatgtcttttatggcattttcccctcctgtgcaggatctagtctagggtcagataccacatttatttgcagaattgtaatttcacaatcatcatattaaagacaggtataggcaggaatcatcgatggatccaggagggaattttgaagaataacaggatatatgcataatcttaaaatatctcttcagaatttgcttattagttacaagaggaaaaagaacgttaagtatacagggaagaaataggacaacatcttgattaggtgatccaaatcaacttcagatgggcaaatggacattgtgtgcctccagatatgagaaaagaaagagcattttaatgcagagcctgaatctaatcagaaggaaacatcagacaaacgcaacatgggaagcattttattttttaatggactatatttttcaaaaatatctatgtcatactgacaaagaaaggctgtgggaagtttccagattaaaggaaactgaagaaacctgatggctaaaagcttttgatgtagacaagcactgggaaaactagctgttttagttgataccacagcagacacacaaacgcacacagacatacacatacatatacatacataaatatgtcaacacccacacataatttcagacccaagagtaactgctaacgttgatttgagagctgtcatagctcaaatgagtgtgggtagaggacatgctaagacttcagcaaaagacagcaggtagagaagaaaaagccaatataattcagtaaataaacatcctctggagtactttgtgccacatgttgtggtaagcactggtctacaggaataaataagacatggcccctgccttcaggaacctccctgtttaatgagagacatagacaaatagattgatgacagtacattatgagaaatgctacaattacaaaaaaaaaagtacctgctgcatggagcccatcagtcagaaaaggaggaaggagaaggtgggatgaaaaacaatatggtgtaacagctatgagccctggcctgggatcctaggcctggtcttacctcttactagatgggtgacttggagaaaggtccttaatcttcctaagtctcagtttcctcattttgaaatgaataggtattgaatatgaatatgttttttttgttgttgttgttgttggtttttttgtttttgtttttgtttttgtttttttgagacgaagtcttgctctcgcccaggttggagtgcagtggcttgatctctgctcactgcaagctccaccttccaggttcacgccattctcctgcctcagcctcccgagtagctgggactacaggcacccgccaccacgcccagctaattttttgtatttttagtagagacgggggtttcaccatgttagccaggatggtctcgatctcctgacctcgtgatccgcccgcctcggcctcccaaagtgctgggattacaggcgtgagccaccgcacctggcctgaatatgttaatagtacctactttacaggattataatgaggactaaaggagataatgcatataaagcactcggctcaattgcatggtccatgcctgtgttattacagggctctgctcctagaagatgctcaaaatagtaactgtagtaagcatggagaagggtgagcaccccagttatgaaggtcagctctgcaatagcattctacagtatccaaaggatatagggaccttaggcatagccccgagtgaaggtgggtgtgcgtgtctgatctagctggcctaaaagcagaaggaagcccagtgcattcatagatcctagccagaggttgcactagggataaaggaggattggggatcactacagaagaggagtcgggtattgcaggatctaagcaagatgtcaggtctatggtcaaacaggcttcagctgcaaaagctgattatcactcactgagaaacgggcaggcctggacctgctcacacaaaaccctggtgaatgcggtggttgtctgtggatacaaaaggcagacataaaagcatgaataattaccaactatctgccaagtccttgttgtatgtcctctccaatcctcctacagcactgtgaggtaggcagcattatctccaccttatagttgagaaagttgagtttcagaaaagacatagttgagaaaattgagtttcagaaaagatagacactttgcccagagtcaccagatggtagcagagataggattcaaatccagatctgcctggatgcaaaactttaggtatcaccccactgtaacagctggagaggaatcctgcccaccacctgctctttagttgcagtgctcatgttgttgattgccaagctccgggtgctggccattctttcaagcaaactcgtatccaaaccaaacctgacctgagttttcactgctttatagagaaaggaaaacacacagaaattaggcaaaaacacatggcaacactaggacacctttggcatctcaacagtgaggagcagcttgatagaaaggagaagggctgaaagaccttgggcaacatagctaacctgtctaagcctcagtctttccctctgtggtgggatcattctgctacctacctcctagggttggtggtaaggattcagtgaaagaactgtggataaagcccttagcacaatgcctttcagacaataggcactctacaaatattgtttctccatggttctctctgcctcctagctaggaggttaatccctaagaaaatcattctggttcctactataaagccaccgtgttaggaaaaaatataaatgtctatatataattctattagaaaccacgtgtggctcagtaataaaaattttaatcactccaatacacacctccttgcactgagaaaggtggttttatttaatacatgcatgtaaagtatatttagctttgatgaataagaattgcagtgtggccagagtggtttgtgagatttttgttttgttgcctactgaaagcttttctttcaagttaaagccagacttgcttagcaaatcattttgccaaggaacgcattacaggttttaaattttgaccaaaaatacttcccatatgcgaagaacataaatgtggctttcaaaagagccaaagagaacaaaagctgggggaggtgaggaagaaaagacaagaatgacagaatggagtggcatgttgcagagctacagtaaactacaggacccgatgccacagtgagctggagtcctagtgaggcatccagaagggacgccctctcttgtgaagatccagactgggcatttgatctttatattcagagcataatctgtgttgttgccagttgcactggggagtataagttccaagaggagcagtaaaaatatcgtaaggcaaccctggaaacgcccagctttaagaatgcaccaaatcagcatgtgagttagcaagctagaatgcttaggttttaatatcaacatgatctgctatttctcccaggcctgaggataatcacgttctttagatttacttacctgcttttttcttcctccccccggccaccggcctgtgagctcttggagggctcagagtatcttatagcctgttctctgtacccaaacagttcttggcacgtaatgggtattccataagtgaataaatacacaaacacaagatgtttttctgaaaaaaaaaaaaaaaaaaaaaaaacactggtagaactaaaaaaactcactttcaggtcaatcttctgtacgtgttaatatgccttaatttaagcaactgtcaaatgctttaaaatgtgttttggtcactaaggatttttaaaaatcatgccttatacctaacaacttgcttttttagttttttattgcacataatacacacatgcataaccacacaacttcattttgggttgtagctcaagctgagaaccttttgcaaattttccatgttgttacagactatttcctgtatgatatcctatgggaagccagaggtgttgtaatccagaaacacccattgttcaccaggactgcaggacacatgctttcagaattcaagggcatagttacaaataattaccatcaagaatttaaaatgaaggacatcgttgctaaacaagaaactaatgactgagtggagctgtgtaatgtaattatacttaagatgggacttctgacgaattacagaagaatctttgtgctgtctcatgtctccataaatacacttaactgctattgacagtaatagaagggagtcttgaatatgaaaagctttttttatccttttatgatttctagagggaaaacttaaaagaacaattatgtttttaaaaaagatgtttctcccagtacttctgaatatttgacaatcctataaaatttgtaaaactaaagtaactttaaaagcaaagacttctgctaataaatcccgacttctcagttta

SEQ ID NO: 330 - DNA, 2844 bp, Homo sapiens
ggttggggtttgggggaggagatccgctcacacacaagaggagagtgttgagccgccatatctgctgctgccgccgcagttgcgaatgcagcatcggcgcttagctgcctccgcggtgcagctaaggttcgtgtcgctaccccttggcccttcgctcttgctgccttaaccccgccggcggagcccgctcttctggcctgttgagcccgctccctcactgccacacagcaagttccgagaccatggattcgggcagcagcagcagcgactcggcgcccgattgctgggaccaggtggacatggaatccccggggtcggccccgagcggggatggagtctcctctgcggtggccgaggcccagcgcgagcccctcagctcggctttcagccgtaagctcaacgtcaacgccaagcccttcgtgcctaacgtacacgccgcggagttcgtgccgtccttcctgcggggcccgactcagccgcccaccctcccggccggctccggcagcaacgatgaaacctgcaccggcgcgggataccctcaaggtaaaaggatgggacggggggcacctgtggaaccttcccgagaggaaccgttagtgtcgcttgaaggttccaattcagccgttaccatggaactttcagaacctgttgtagaaaatggagaggtggaaatggccctagaagaatcatgggagcacagtaaagaagtaagtgaagccgagcctgggggtggttcctcgggagattcagggcccccagaagaaagtggccaggaaatgatggaggaaaaagaggaaataagaaaatccaaatctgtgatcgtaccctcaggtgcacctaagaaagaacacgtaaatgtagtattcattggccatgtagacgctggcaagtcaaccatcggaggacagataatgtttttgactggaatggttgacaaaagaacactggagaaatatgaaagagaagctaaggaaaaaaacagagaaacctggtatttgtcctgggccttagatacaaatcaggaggaacgagacaagggtaaaacagtcgaagtgggtcgtgcctattttgaaacagaaaggaaacatttcacaattttagatgcccctggccacaagagttttgtcccaaatatgattggtggtgcttctcaagctgatttggctgtgctggtcatctctgccaggaaaggagagtttgaaactggatttgaaaaaggtggacagacaagagaacatgcgatgttggcaaaaacggcaggggtaaaacatttaatagtgcttattaataagatggatgatcccacagtaaattggagcatcgagagatatgaagaatgtaaagaaaaactggtgccctttttgaaaaaagtaggcttcagtccaaaaaaggacattcactttatgccctgctcaggactgaccggagcaaatattaaagagcagtcagatttctgcccttggtacactggattaccatttattccgtatttggataacttgccaaacttcaacagatcaattgatggaccaataagactgccaattgtggataagtacaaagatatgggcactgtggtcctgggaaagctggaatccgggtccatttttaaaggccagcagctcgtgatgatgccaaacaagcacaatgtagaagttcttggaatactttctgatgatactgaaactgattttgtagccccaggtgaaaacctcaaaatcagactgaagggaattgaagaagaagagattcttccaggattcatactttgtgatcctagtaacctctgccattctggacgcacgtttgatgttcagatagtgattattgagcacaaatccatcatctgcccaggttataatgcggtgctgcacattcatacttgtattgaggaagttgagataacagcgttaatctccttggtagacaaaaaatcaggagaaaaaagtaagacacgaccccgcttcgtgaaacaagatcaagtatgcattgctcgtttaaggacagcaggaaccatctgcctcgagacgttcaaagattttcctcagatgggtcgttttactttaagagatgagggtaagaccattgcaattggaaaagttctgaaattggtcccagagaaggactaagcaattttcttgatgcctctgcaagatactgtgaggagaattgacagcaaaagttcaccacctactcttatttactgcccattgattgacttttcttcatattttgcaaagagaaatttcacagcaaaaattcatgttttgtcagctttctcatgttgagatctgttatgtcactgatgaatttaccctcaagtttccttcctctgtaccactctgcttccttggacaatatcagtaatagctttgtaagtgatgtggacgtaattgcctacagtaatgaaaaattaatgtactttaatttttcattttcttttaggatatttagaccacccttgttccacgcaaaccagagtgtgtcagtgtttgtgtgtgtgttaaaatgataactaacatgtgaataaaatactccatttgaaactcttcggttatttgaaatgcttttgaataatgtttaaatgtcattatgtaatgctattcaattagctttattactttctcaaatagttgaatatgttctatcacttaaaaacttaaaaactcttcaccacttactgttttaagtgaggaatttacaaacaatgcataagtgtgtattaaaggaataattttaattttgagaaaaaaacgtatgttaaggctcttcccagtgggctttgttttctctgtccaagtccagtcaataaaggagctcttctgcttccccacttgtgatttg

SEQ ID NO: 331 - DNA, 44060 bp, Homo sapiens
ccgggaaacctgccattcttcgctgctgatcgcgggattctttttggatagggttgacgttcgtggatagactcatatctgtgaccagtgtccgccaccgcggatggcaagagacctgatcggaccggccctgccgcccggcttcaaggcccgcggaacagcggaggacgaagagcgggacccgagccctggtaagcggcggcgtctccgctgcccaccaggcccatctacccactccctggccgggccctgctcgctgaagaaagtcggaggcctaggagggcggaggagtggggagtgggcgcggcctgacccgagagaacttttctcttcccaaacagtagcaggggggaggaggctgggggaccctcctagaaacgagctttggcgtggtttggcttcgtgatgataatacattctcatttagccttaatatgagctgcacgctgccctaactgactgatacccactcagtcatttaagccgtataagaaaaaaactattttcccatgttgcaaatgggtacgcccaagcccatgccagtgtctagatcatactgctagcaagtgatggagcgcgacttagaaggaagcggttctcttaacctctgtgccatattgccttctgattacaagaaccttgcagatcctgttctctccagcccccgacctgccttcctagcctctcattctgttattgcatctgacaaacacagcccaatactcaatccagtctgagttgctgcgcaattccttaacgctctaggcttctgggcttcctctggttgcattcctaaacataactgacaaacttctccccatccttcaaggcccaacttaaatgtcacaccaataaaacctttccagattccccgaagcattgtcatgcctttctttttgccctcgggttttttcctaattacattgcatatttagtacactgtatttgaataatttgtcgacataatctgtctccaccattgcactatggtcttctacctgaacacgcaacaggcacttggtatatacgaaacgaatgcttctcggattccggcatgcatacctatctgctttaatgtttattcacatttgtagactagcaccgacacccagttggagaagagtaaagctgaaagagtaaccctgccatttctgaatctaatttttcttcctggtctacccggaggctatgtttctactacaggcccctttccaatataatttctgtcataaccactttaaaaattatgccttccagctgagcgaggtggcacaagcctgtaatctcagcactttgagaggctgagacggggcggatcacttgaactcaggagttcaagaccagcctggccaacatgttgaaaccccatctctactaaaaatacaaaaattagccgggcgtggtggcgggcgcctgtaatcccagctgctctggaggctgaggcaggagaatcgcttgaacccaggaggcggaggttgcagtgagccgagagtgccactgcgctccagcctgggcgacggaacgagagtttgtctcaataaataaataaataaaagtaaatgtgaaaaattatgctttccttcctgtaggagatagctttaaaaaaataaaataaggccaggtgcggtggctcacgcctgtgaacccagcgctttgggaggccgaggcgggcggatcacgaggtcgagagatcgagaccattctggccaacatggtgaaaccctgtctctactaaaaatacaaaaattagccaggcatggtggcacgtacctgtagtcccagctacttgggaggctgaggcaggagaattgcttgaacctgggaggcggaggttgcggtgagccgagatcgcgccactgcactccagcctggcgacagagtgagactctgtctcaaaaaaaaaaaagaaaaagattcttcgtatatatttgttgaatgacttctcttcgtcaagcacaatatcttacacgtagtgtgtcattttaaacacataatctcccctgctataattccattcccttcataaccgcctagatggctgaacctaaaacggttgccaaaaaatcttcatatatcatttttatttcatctatctggatttttaagaagtttgccagtaccaatggccttcacatccactatatcacaccatagaagctgcacttggaccatcttccagttattacctgcatcaccacccctcctacaaccagagggtaactgcttccttgatttatagcatcacagattcgttttgcatgttttctctttcataactggcttcctatcttggtactacattactttgtgagattcattcatgtagattagcattattatagattgttgaagttcataatctggtctttaaacaaacagaattattataggttgtttctttacattgctatatagtcatccattagatgaatgttctgcaatttatccattttacgttggatgaacatttgagtaatttccatttggaggctgttataaaatgtgctgctatgcattgtagtatatgtcttatggtagatactcccagcttccaaagtcaccaaagttctcagcgtgtatgagaattctagttgttccacattctaatatttagtttttttcttttaaatccggtggtttgtagcaatatctcatggtagttttaatttgtatttccctggtgacaaatgaaattgaccaccttttcatgtgttatttgaccatatgaatacatgctgtgttcagtcttttgcttatttttccattgagttgtctgtcttcatattgatttatagagttctttttatagtctggatatgagtcattttccagataggtgtatcagaaatatcttctctaattctgtggttttttcactcatgttggtatgttttgattaacataagtttttaattttaatatattctgacttttaatttttttcttttatggtagaattttttgcatcctatttaagctatctttgcccaccccaaggttataaagctcttctgtgttttcttctaaaagcattattgtttcagctttcacatttatatttgcaattcatctggaattgatatttgtgtgtggtgtgagatagggatgaaaattttttgcccctgtaagggtatcctggcaccatttattgaacagaccatcctttcaccactatcaccttccttataaatcaggcaaccatatatatgcatctagttttttttcttgtttattctggtaaaatatacacatctgtcatattaaccatttgtaagcatataggtcagtggcacttaggtacagtcacattgttgtgcggtcatcaccaccatccatctctagaactattttcatcttgcaaaactgaaacctattcccattaaacaataactccccattctcccctctgacccagtccctggtaactaccatctactttctttttctgttaattggactattttaggtacttcatttaatggaatcatacagtacttgccctttggttactggcttatttcacttagcataattttttcaagctttacttattgtagcacgttagaatttcctttctttttaagactcaacagtattccgtgtatgtatatactgtatagactacattttgtttattcatctgttgctggacccttgggttgctatgtatgctattgtgaataatgctgttatgaacatgggtgtacaaataatctgttcaagtccctgctttcatttcttttggtcgtatacccagaaatgggattgctggaccatgtggtaattctacaacattttgagaggccgggcacggtgactcacacctgtaatcccagcactttgggagaccgaggcaggtgacctcacctgaggtcaagaggtcaagaccagcctggccaacatggtgaaacctcgtctttactaaaaatacaaaaattagccaggcgtggtggattacccagagatcttgttaagatgccaactctgattcaggtgatctgggacctgtagtcccagctactggggaggctgaggcttgagaatcacttgtacctgggaggtagaggttgcagtgagccgagatcgcgccactgcactccagcctgggcgacagatcgagactccgtctcaaaaaaaaaaaaaaaatttgaggaactagcatactgttgtctacagcagctgcaccattttacattcccactagcactgtacaagggtctgtttctccacatcctcccagtgcttgttaatttctgtttgtcttttttttttttttataatagtcatcctaatgagtgtgaagtggtatctcattgctttgatttgcatttccttaacgattagtgatgttgagcaccttttcatatgcttattggcttgtgcatctaggtttaagaaacttgggtcaggcatggttgtttacgcttgtaatcccagcactttgggaagctgaggcaggcattcttgaacccatgagttcaagaccagcctgggcaacatggcaaaaccccatctctacaaaaaatacaggtagtgcatgcctgtagtcccagctacttgggaggctgaggtgggaggatcgcatgagcccaggagttggaggttgtagtaagctatgatcatgccactgcactccagcctgggtgataaagtgagaccctgtctcaaaaaaaaaaaaaaaaaaaaagggagagagaaagaaagaaacttgaatttagagtctaatttcttaaaaaaatgccctctcgcggccgggcacggtggctcacgcctgtaatcccagcactttgggaggccgaggcgggcggatcacctgaggtcaggaattcgagaccagcctcaacgtggagaaaccccgtctctactaaaaaaatacaaaaattacccaggtgtggtggtgcatgcctgtaatcccagctactcgggaggctgaggcaggagaattgaattacctggtcttctctgttcctgctgcctaccatgtcccatcctaccttgaagtcttcatacatgttgttccctcagtttgagtgcttcctcccatcccttagtttcgttcgttttgctagttttcagagctcagtacaaaacttcatcttgggattcaggtgttatgggcctcctcacgtgataaacataaagtcacacagttttccaaaatacatggttttcataataaaagtattcttgaaattatttattcgtggttttttgttgttgttgttgatttagggtcattgttcagaatatcacattatatatatcgttagataattagaaatgtgaggcattggagagagagcattttattttttttttgagacggagtttcgctcttgttgcccaggctggagtgcaatggcacaatctcggctcaccacaacctccgcctcctgggttcaagctattctcctgcctcagcctcctaagtagctgggatacaggcgtgcaccaccacacctaactaattttgtatttttagtagagagagggtttctccatgttggtcaggctggtcttgaactcccgacctcaggtgatcctctcgctttggcctcccaaagtgctgggattacaggcgtgagccactgcacccagacacaagcccctatctttaaacacacacacacacacacacacacacacacacaccccttctcttttggtttctatgataccatactcccctcatttttgtctcctctttgggcagctcctcttcatctcgaatagtttatcttcaattaaaccttcaggtgttaaagattctgaaagctgactcctaagccctctttttttttaatactctattctctcttttaagtgatgatattcccacccatggggtgaaggtttttatataagaacttagatgcttatctaacatctttgtttaatgattcccagtgagagttcctatcagaatctttaaaaaaggagatgaacttctaaaaaaaatctttcaatgttctagccagtctcttctttcctcccctgacaggattttaaagtattccaagttcaggagcaaagactaaattaccccctaagtccctgggactgtcccagttttagcactaaaaatcccacatcccaagaagcccttcaatcccaagcaaaccagcacaattggtcaccctatttctgtcttctgtagcagtgcaccttaaacttgaacatgcacatggattacccagagatcttgttaagatgccaactctgattcaggtgatctgggtgaggcctgagattctgcatttctgacaagctcccagctgctgctgctgctgctggtcctgctggtgccaagaccacagtgtttgtggtgagggatgggagcacacgtggctttctctatctgtagttattgtgctggattgtttgctggtttgccccactaaaccatgaggaaaggaaccacgtcctaagcctctgtaatccccaatactagcagggtacccagcacaaagtgggtactcagtagattccttttggcggagtagaggacagtaaaaattcctggtcaggcgcagtggctcatgcctataatcccagcactttgggaggctaaggtgggaggatcacttgagcccaggacttcaagaacagcctaggcaacatagtaagacctcatctctactaaaaatttaaaaattagccaggcatggtagcatgcacatgcagtctcaactacttggggggctgaggcaagaggattgcttgagcccaggagtttgaggttgcagtgagctgtgatcacaccaccgcactccagcctgagtgttaaaacaagaccttgtcgcaaaaaaaaaaaaaaattccttaagaggggcccaggatttatgggggttggagaagccaggacctgcatgaatacagctaaccataatcctttgtatggagtctggaagaaacctaatggctggctgggaacgggatttttttttttttttaaacagcatctcactgtcatcctggctggagtgcagtggcatgatctcagcttactgcaacctctgcctcctggttcaagtgattctcctgcctcagcctcctgactagctgaaattacggggatgcaccctcacatctggctaatttttgtatttttagtagagatggggtttcaccatgttggccagactggtctggaactcctgggctcaagtgatccatctgcctcagcctcccaaagtactgggattacaggcgtgagccactgtgcccagcctctttttttttttttttttttttttttccagtttttaaaaattgtgataaaatacacataacatgaaatgtaccatcttaaccatctttaaatgtacagttcagtggcattaaatacattcagatgattgagcaactattaccaacatatccacatctcttttcatcttgtaaaacagaaactctgtactcactaagtaataactcctcattcccccctccagctcctgacaagcaccattctactttctgtctctatgatttgactactttaagtacatcatttgagtggaatcatacagtatttgtcttttttttttttttggactggcttatttcacttagcataatgtccttaagtttcatccatgtggtagcaggtgtcaggattaccttcaagtgaagattcctgaatccagtctgttatctgtcctgtgttcctcacactctgctgtcccagaaggagatctgacaagcatgaccagagtaaagaggagtgagggagcacacaggtctgagatggaacaagttaacttcatttgaatactctgaaaattgactgctggaaaatgtcccccaacgtcatgtcattagaaaccctggggtgcaaatattttctcaagagcgatccacagactccatatgctgttctatggaagctgagtggagccttggccattttgactctaactccagtctcctatctgcagtgaccttcacctccactaatttcacctacattttaagctggagtagtgagtctaccctactccagctccaaaaactcaaattcaaatctcattctcagcaagaaccccttattcattcattgttctcactcaagttactcccatttcatttgctttttatttttgttttttaacctcattgagccttccatccctaagtacttctatccctaagtacttccatctgagaggagtgcttacatccctactcctgttagactccatggtccacccattcatccactctcttgctggtgctctcaactgctttatcccattgggtattctgccaaacccatctaacaaaagcccagccctggatcagtccaagtgtttaccccttgtgagcctacagccaggcttcctaatgctgctagaagaaacctcacgcctccacaagctaatgctgctaaaagatggcctgttccctaactgggtccataggtctgtccagtaatcctcacaggcttcacctcctttctcttccccaatctgcaaccttggctttttaaaactttccctttctttctaaaacttttatttttccgtctacttcattgaacaagtagatgccatcataagagaacttcctcaattttctgttactgtatctaaaaactatcctaaatccacgccaagctttttgtctgccctttggtaacaatagaagaggtatactgcttccttctaaagctaatccttccatttttactctgactcccttccctgtccttagggctgcctgcccttagcatttaaccaaaacattcaaatctttcccatctttgaagaaaactctacttcatatccccctctagctgcatctttttctttctcactgtctctgggtcttctattttctccttaacccattgcatttctgccctcaccagtccactgagaccctcaccaattcaaggcttccttttcagtcctagtcttccttgacctcacagcaacatttggcccctctctatcctctcttggttccaaccatcctgaacacctttcagttttctaaatgtgatgactcttttgctttcaggcttttgcagatgcttttctttctgcctggactactcttcgtccagtccccaccttctttgcccagctaactcaggtcccacccctacatcactgcttctaggaaacattctttgatgttaactacctactgcctgtaaaagatgggttgggtgccccttctttatatttgcatgatttaaccatgtcatggggtcagcaaacttttcttgtaaaggaccagatagtaaatacagttgaccctgtagatctgcaggttctgagtcttcaggttcaaccaactctagattgaaagtacaatattcaagggaagtggaaccaaggccatagccacagattttggtagctgcaaacaggggagttggtcctggaaccaatctcccgagaataccgagggacaactgtacttttgactgtaggtcagtaggcaaaatcaagattattgtaaaagtatgtgtacaacaagaaggaagcaaacttcacaaaattttattgttgcaatctaaaacataataccatataatttttttgtaatacaggtctactaatgagaagaacagaattggttttgggggagtaacatttcatttcatcggagttcaagttagcattcctagtcatcagaatcagttgtggatgttcatctgttaatgctgatctgtaatgagatttttatgtattatactgagttcatttttttatatgcatatcacaattctgtgtgatatgaaagggaaataagtgaaatataaggaacgcgtaactcctgttctcatggaatttataatctatttggaaaattatcattgcaataggagagcctccttaatgacgacaagcatcactgctttaggagagatatggaatagttcattacatgttcccaaaataattttttgagattattcatagttcagaaggatatctataaaaaagtgaagccagacatgtccttacttttattagggggtctgtattgtggcgtatactgactgacacttttaatattcttctcttttttcttgagacagagtctcactctgtcaccagactggagtgcagtggcgtgatcttggctcacagcaacctccgcctcccgggttcaagtgattctcctgcctcagcctcctgagtagctgggactacaagcatgtgccaccacgcccagctaattttggtatttttagtagagatggggtttcaccatgttggccaggatggtcttgatctcttgacctcatgatccgcctgccttgtcctcccaaagttctgggattacaagcatgagccactgcgcctggccccttttttcttttttatatcgccatctcagtattctatcatttcatgatgaaatagttgtttattttgaacaactcaaatagaaattaatggtactatgtgctgaatgttacttttttatactatttttccgtgattatttttaaaaggccaggttttcttagatgagttttatcttcatctgcttattatctttttaaaaaatgtatatctcgtttgtttctttaaaaatccatggcaattttttagttgtaatagcaccaggtgtggtggctcatgcctgtaatcccagtgctttgggaggccaaggcaggaagatcacttgaggccaagcgttcaagaccaagctggacaacatagtgagaccctggtctcaaaaaaataaataaaataaaatttaaaaattatctgtgcatggtggcaaacacctgtagtcctagccatgcaggaggccgagatgggaggatcgcttgaggccaggagttcaaggttacagtgagccatgatcactgctttctaacccaggcaacagagcaagactaaataaataaatgagtgaatgaatacataaataaaaggtatgtgtgtacgttataataccaagaacagcacatatttagaccatattacacatctaattgcttaaaatatataaaagaataataaaattttttcttgatacaaacctatccaaaattggccaatagtatacaattgataaattacatggatagcagtcacatataagaagagaaagaagcagaagaggaaaaaacatatcttccctctttaatgtacttagaatcaagaagatgaaaagagccaatcactcctgtggggtcacacatgaggttagaggtcacatatagtctctaaattataaataaattggggaacacttacatactaagacattaagtcttctttagtaaaccctaaacagcagttggagataggaatcccatccatgatgcttgatgttttcctttttgctgtaacgcagcatgccttagagttattcttttctaaggcatgttattacctgttctatagtaatgcaccaagagagataggaaaaatttttttgaaataggccaatgattccaaaactagccttagtttctcccctgagctttacactgtaataatgtttggctatgtccccacccaaatctcatcttgaattatagtttccataatccctacatgttgtgggagggacctggtgggaggtaactgaatcatggtggtggttaccctcatgctgttctcgtgatagtgagttctcatgagatctgatagttttataaggggcttctccccctttctctctgcacttctccttcctcctgccatgtgaagaaggatgtgtttgcttccccttccaccataattgtacgtttcctgaggcctccacaaccatgctgaactgtggctcaattaaacctctttcctttataaattactcagtctcaggtatttcttcatagcagcatgagaacggacttacacaccctatacaccctagtatgcccaagtaccactgatagcaccacctaaatttttaaggctgtatgaaacttaaaatgtgaaaaacaaactctcaactctcccctcccagcctattttcttcccagccttctccatattagagaataccattgcccttcacctgcctagctagtcaggcacaaaacctaagacctatccttggttccttttttttttcttctcacctctaacatccaaaccattagcagtcctctttgcccttacatcagagtatgttgcaaatcaaaccttttttttttctttcttttttttagatggagtcttgctctgtcgcacaggctggagtgcaatggcgtgatcttggctcactgcaacctccactgccagaattcaagcaattcacctgcctcagcctcctgagtagctgggattacagacgcacaccaccatgcccagctaattttgtatttttagtagagacagggtttcaccatgttgcccaggctggtcccgaactcctgacctcgggtgatccgcccacctcggcctcccaaagtgctgggattacaggcgtgagccaccacacctggcccacaccattttttatcagctttctaatgcatatcccctgttgctgatctctcttgtctattgtccacaagctgacagttttttgtttgtttgtttggtaattcatatcatgtctgtcctgacccacaacctcccaatgactgcctgttgtaattaaaatccaaactcctgctggatgtggtggtgcatgcctgtagtcccaggtactcaggaagctgaggcaagaggatcgcttgagtccaggagttctgggctgtagtgcgctatgcattctggtatccacactaagttcaacatcagtatggtgacctccgggagtgaaggaccaccagattgccctaaggaggggtgaaccagcccaggtcggaaacaaagcatgtgaaaactctggtgctgatcagcagtgggatcgcacctgtgaaaagccactgcacttcaacctggacaacacagtgagatctcgcctcttagggaaagggaacagaaaagggaaagggaaagagaagtccaaactccttattgtagcctgtactagcatttattgagcacttgctatatgccaaagactttgttaggtgttttgcatatattaactgatataatcttcacaacagtcctgtgaggttgaaactattattaacctcattttacaaagcaagagtgtaataggaaggttaagtaacttatccaaatcacacagctagtaagtggccaacctggaattcaaagcacagagtctgcctccaaagcaagagtctggcccctttataccatccaacttgatgtcgtcattttgcttttctttagccacactggcctttttattcctcaagcacatcaggcttgctccctgcataggagttgtgcactggctgttcctctgtcatctcatcatttaagtctccattcaaatgtctttttctcagagagatttttgccttaccactgtctttaaaattaccctcccacatatacagtgtcacctttttcctattttcatagtagcatttacactatctgaattgatcttaattcttttaatgtttgtttctctagaagtatttacttaataactgttgttggatggatggttgctgactattgagtattggctagtatagtggttaaggatataggctttgaaatcagactcctgggttcatgtcacagccccactacttagttgtatgaagttaggcaagtcacttaacaattcttggcctcagtttctccatatgtaaaatagaaataatatctcccttataggattgttatcagaattaaatagaataatgtgtatgtctcttaaaacaattcataacacctaagaactcaaaccatgttatttgttatttatttattacacttaagtttttgtagtaacaaatattactattactataatattgaatgaatggcatacccagaatactctttggaaaatcatgtttccaggccctcctccaggccaactgggttagaatatctgagaaaagggcccatgaatcttttaaaaatacatagattttagggagtctgataaatatccaaccttgggaactatgatagtaggcttttagcatcactatttaggatcaacctggacagttgtgtctgtgtgacatcatcagtgacatcatgacactgcagtgacaccatatagtaatttgtaattttgctgagatgtaaagtgagagcaagtcattctgataagtggacctagaagacccttaccactctccctaacatccccattacagtgcagcctcattctcttccctgtatctctgttggcaagcagtaaaacttagagtgactctaattttatttctgcttggaaaatcatctcaaaaagaaaactaaccaagaaatatggggatgccaggaaagattttttttttttaagtagtggttctaccgtaaactgtaagaaaaaaaaaaatcatgaagccattggggtttttttttgtttgtttgtttgtttttttgttttttttggcaggtgcaccaaccaatgcaaaaactgcacattatcaaggaaattacatgctattgctatatctataagttcgggtttataagttcagatattaacaaagcttttgtgaatctcatgaaagagattgtgtaagacatgatttctgccttcctagagctggaaagacaaaaccactgtacacaaacaacagcaattgagattaaagtgaataataaatgatagacagccagtgctgtttatttcagaaaagaaagtgaaaaatatcagctagaagggttcattgaaacagtagtggctagtgatgacaaacaacaagtgttctttagttgcaggaccagctctgccccctaattataaaagcagtagttcagattcatcagacagcgatgaagacagtagttctttgtacgaagaaggaaatcaagaatctgaagaagatgacagtggtccaactgcaaggtcagtcatttaattaaattaaatgatagaccaaacttcagagctagtataagttggctggaacagatagctagtaaggggatatcatatttccatttatacagcacagggagaaatcattttgtgtggcatttcatcctgaattataccttttacaaagaaatttattctagtagtttgcagctatagagatatctagaatttcaatatatatgtatattttttcctgagacaggggctcactctggcgcacatgctggagtgatgtggcacgatcttggctcactgcagcctctgcctcccaagctcaagcgatcctcccacctcagtcttctgagaagctggaaccacaggtgcccgcaaatttttgtattttttgtagattttttggtattttttgtagagatggggtttcatcatgttgcccaggctggtctcaaactcctggactcaagtgatctgcccgcctcagcctcagaaagtgctgggattacaagcatgagccaccacaccagccaataaaattcttacataaatgatttttcttaagatgtcattgaagtgccaaaataggctacataaaccatagaatttcttattaaaattatatatgcagtgtatgttttctttaaataaactaatggttttcttttttttttttttttttttttttttttttgagatgaagtctcactctgtagcccagactggaatccggtggcacgatctcagctcactgtagcctctgcctcctaagttcaagtggttctcctgtctcagtctcccaagtagctggaactacaggtgtgtgccaccatacctggctaatttttggattttttagtagagacagggtttcaccatgttggccaggctggtcttgaactcctgaccccaagtgatctgcccgcctcggccttttaaggtgctgggattacaggcatgagccactgtgcccagctgaatgattttcctctaatctggccttacccactatgagtctatgtaaatgagaagtcaaatctttgtttattattgagtaacaagcttttttgattcattttaaatattatcaggtggaaatagcaacttaaaacccttccttagatgagaataaaagtcacagtcataaactttttactgagaaacatctgaccaatagactttgaaactgcattgaggggaatctttaataccacagaaaatatagaatagtgatatattactgctgtaaagaaataaccaatctgtattttaggccaaaaataaattccaggaaaagactagttacgaactattgtcgtaggccaggtgcagtggctcacgcctgtaatcccagcactttggaaggccaaggtggggagatcacttgaggtcaggagttcgagaccagcctggccaacatggtgaaaccccgtctctactaaaaaatacaaaaattagctgggcgtggtggcgcttccctgtaatcccagctacttgggaggctgaggcaggagaattgcttgaacctaggagtgggaggttccagtgagccaacatcacgccactgcactccagcctgggcaacaaggcaagacttcctctcaaaaaataaaaaaaaaaaaagaactatcgtagtatccagtttttatttggcaggattaatttattgttgcagtgtttatacaactagatttaatgcttttttaaaaaaaattaaaatgtgcttttgtgaaaaaaattttgacatatatgcataaagttatactactatgttttcagaaaacagaggaaaaatcaggatgatgacgatgatgatgatgatgggttttttggaccagcccttcctcctggatttaaaaagcaggatgattctcctccaaggtgataatgtgtaatattttaggccagtctttctttaaatattttaactaatgaatctttaatgaattaaagaattgtctgaaattatgttttaactgaaatatttatataacattttgaaatgggtcattcaccaggaaaagaagttgtttcctacaataaaaataattatttacatgtttatgacactttcatagtttacaaaaaacttccacatctgttatttgatattcacaaaagtgttttgtggtaaacgaggtggatcacccctctccccactttataaacagataaggtcacacacatagtagcagacctggagctagaatcttgatgttgtgacttttaattcagttgttttcttaattatttatcaatagaagaaacacatccccatgtgccatgttagacaattggactaacttctctgaatcttaaatttgttatctgtaagctaggataacagcatgtactttacagaattgtgatgattgaggtttcatagttacataccttgactttgtgtgtgggtgtttaatttatatggagcctggcacagagtaagtatatagtaaatatttattcctgtcttcttcccagaattgtaaaatttttaaatgccaaatataagatcgcacatcaaattgtttataattcataatactgtataccaatatgcaagaacaagcagaaaaggctttttattttatattcaaagtttataatcacatttggcagctcctaacttccattaactttagttgtttcagatatacagggataggcaatctacagtccccaaactaaaaatgatttttgcatttttgagagtagctgaaaaaacaaagacagatatgccacagagacccacatgtggctctcaaagcctaagagttactatctagccctttatagaaagtttgctgacccctaggatgtaacattccttttaagaaaacatattacttaaatgtataccaattttattcttaagaatattattttggcaataataaaatgtatgtgtaaaataaacagctggcattatatattggagttagaaaccttttatagtatcataacatgccatggttttattcctttactatgttttatgattttatataccagtaattttatcaccaccaatcccctgaggccagaaagttaagctataattgcatttgtagattgctaaaaattgtactcagaaaaaacctatgctgtactcatagcttataaatgatacctaattttatctttttaacagtgccaaacttccctgtctttcataagcaaattgttctgctcaaagaagtttcatgaatcaagacaagagattattaaatggtcaggatgggaacccagactttctgactgtcagtactgttatttcccctgccaggatgcctgtctgtggggttctgatagaacatggtgcaacctggaaattttagcttaggacttcagtgccatctgggttggtaacactggcacagtgacaactatggaaaaaacatttgtacaaaagcaaggatgaagaatcttaaaagtgtgaaagagagcatttttttattttttatttttatctttttaattttttccttcataaagtaaggctgtctccttttaagacccagtgttaaggcaagtctctcttttgaagtgatgacagttgcctcattatttggcagtagggcagctggaaagaaaatgcactttgacatcaagtagaccagggtttaaactctagctcagccacttactaattgtgttaatcttggacatgattttgctcatcttaaaagtggagtgacttacactgaccaggattgttttaaggaaacagatgcactgcttgaaatatggttagcacggtacccttttccctttctgtgggtcttaatgaactagctgcattcttctacagttccacatcattactgaggacaatgtatagatttttaatactgccatgttatatagaccacagattgctggcattgtctgcacatgctatatatgtccttagaagaactcaatttctactttggtagttctgaccataattataatgcccctaaggtatctttcacgggataatgaatctcaaaactgaaggaaagccaaggcacaaaataaaaaaagaccatcacagattttagtacatcaatttttttaaaacattgccatttttatttaatatagttctttttaggaagtgtgcatatgccagtgtcacaaagattgagaattattggcttagtctctaattattgactaacaagtagaaaagtcaaatgtgaaaattaggtttttaaaagacgtctagcagaaagatactaggtaatactagtaaaaataaagtgttaaataaaattcttattttcaacatttgtcactatttggctttattatttttgtgaacttttattcttataactgctttttaaagtcagggagaatgataaaagtacattttatttttcaggcccataataggtcctgcattgccacctggtttcattaaatctacacagaaaagtgacaagggcagagatgatccaggacaacaggtatcatcatcccatttcaactctaaggtttggaaagttttcattgaaagaataagatgtattgtaacaaactccaaactttatgcatgcagttactacaaccactggactcaactgtaatgtaagactcagttatattcagattaatttaagattgtaacataagtagatgaaataaaaagctgttcacaaacctgagattctgttaggaaaataacaggattgacggggtgttacctattcatacttcttatctttgaagggggactttaaggtgttagaaggatggaacatgaagaaaagtttaaggaatgattgtgatttggcctttaggagagaaggttgaagagctttttaacaatggtctttaccttgaaatttactttctcctaactaagctttagtatctgtgtataaaaaaatgcactggtggataagtgattttaggaaaagatagaccaaatgactttggagtaaagtataaaggctgtttttctccttaacaagagttgagatttgtagagtactttacaatttgtaatgcattttccctgtatgtggaccttattttatcttctccacggtttcatgaaatagatattatctgcaccttacaaatgctaaagaccaaaaaaattgggtaccttacccaagattacacaatttttactgatcaaagccatggcacaaacccagttcttatgactttaaatcacttgttcaatctgttatactgcagtgccttcctatgtatgaattcatatattccagagactcctgtttatctccactaagaattcaacagttacactgaggttgttactcaaaggatgtataatgcagtggttaaaattatgaatttcagagtcatttacttattctttcaacaaatgctcatagaacacccacagtgtggcaggcacatagtcacagaaatgaatctgtcaacaaattattttgttcctatcttcataagacatccaggactcagccacttctgctcccaccctggtccaaataaccatcaaatttcaccccttttattgattttcatgctttatgtagccctttctcctctattaccccttctcaacacaacagctgaaggggtccagatgaaacaaaggcagatcaaagtcagatcatgtcactaacactcaaaaccaccaaattactcctcctctccctaagtcaaaaccaaagtccttttagggccctatacagtctggcctctattagcactctgattttatcttttgctttgatgtgaccacactgggctccttgctgttcctcctcaaatacagcaggccacttcctactcctgagcctttatgcctgctgtccaagcctatgcaaaatggtcttctcctacatatctatgtggctggcctcctagaccttcagtttttttgctggaatattatctttccaatacagtcatctctggcctccaaattaaaatatgctaacctcctcttcccttctttaattttccccatagtatttattaccaccgaagatactattaattttactgcttctttttgtttattgttgacctctttccgctagaatgtggctccataataacagagattttttttatcttatcaccagtgccttatacatagtagatattcagaagtatttgtcgaatgaatgaatgaatcaaacacagtgcctgccctcatcacacttacaaggtagtggggaatacatacatcagtttctaacattgtcaattattcaaaagatgagacaaaatataaatggaaccatgatgggggaatgtaatctgaaaatgagaaaaagtctttttcagccaggcgcagtggttcatgcctgtaatcccacactttgggaggccaaggcgggtgggttgcttgagctcaggagttcaagaccacccagggcaacatagcaaaaccgcatctctaccaaaaatacaaaaaaatagctaggcatggtggcacatgcctgtggtgccagctacctgggagctgaggtggaggatggcttgagcccaggaggtggaggttgcagtgagctgagatcatgccactgcactccagcctgggtgacagagcgagaccctgtctcaaaaagaaaaaagaaaaaaaaagaaaaggtcttcttatctgagtgaatgtctactaacctgaagtttgatgaattggagctagttcagcaaagaaggcaaggaacattgttccagagagagcagatggtttatttgaaggcaaaagagagtgtggagaggatgaaagttagggttaaagaagttcaatatggttagaatggagaatgcagggagaatggtgagagagaaggtgaggaaagtaggtaagagctgttcaaagctttgcgttgagcctagcttgggtacgcttagcttcatgatcagtaacatgcaggtcattacacttacttcatagggttgttataaggattaaatcagaatagtagttgtattagtccattttcacactgctaataaagacatacccaagattgcgtaatttataaggaaagaggtttaattgactcacagtttagcatggctggggaggcctcaggaaacctacaatcacggtggaaggggaagcaaacacgtccatcttcacatggcagcaccaaggagaagactgagtgcccagcgaagggggaagcccctgatgaaaccatcagatcttgtgagaacaaactcactatcacaagaacaggatgggggaaaccaccccatgattgaattatctccacctggtccctccgacacgtggggattatgggaactgcaattcaagatgagatttgggtggggacacagccaaaccatatcagcaagtattcaacttcaaatagctctcattattaccattgttcttattgcctccactatggatgccatgagtgtaactgaagaatttaggctaagtacgaggactcctttctaacaagggcgttgaagaaaaaattaccagaggaaggacttccagccatatggaagactgagatgacatcgtcaggctaggctttccctgccatgaacacaaaggagtgctaggggaagaaataaaataacaaccattttaaaacacagcaaagctcaaaaggaagaaaggaaaattcacacatactaacaacattgagggaattcaaagccagacacaggtttacacagcaggggactacagtcgttttagagaacccagtcataaaccctagagaatctgggaacaggagccctggcttctggctcactcagccagaggagattgaattgagcaccatgcataaaacctgcagcctcaaagttctgctctgtctgtaaaaggaggacaaggggactagaggaccagagaaatgtaacccactgtccctaggaaggtggcaaggaaatttgcttctgcctagagccttgtcattctatctgtaacctactttcaaatggttctgaaaaaaagtgtgtgtctgtctatctcgtggggagagggacagaaaacaaaccaaaaaaaatgaatgtgttaaaatgtaatgtgccactcagttggtaaatctgagtgatgacatattggtgtttattgcactcatcttagcacttttatataggttcaaaatttttcaaaataaaaaattggggaaaaaaattttcaaaggagtagcacaattcagcattattcacacttggaattttgtcctaacctacctagttagcaaatgagtagcttacatcgtttccttggtggtacacattctacattccctggcttcttttggtagaaggcgagggtcaggctgggacagagattacactgtaggtccatatgtgaggtgttcttgctctgattgtttgccttataatttccctttaattgaacctttttcaaaagacctttctttttcagttttgagattttcgtttctcaaagatgggcttttctttgcctcattcccggcatatacccccaaattaagacatacacaataatattaatggttgacatttcttgagcacttaccacaagccagacactgcaacagcagcataaacttaacttaatccaaacaacaatccagggaggtagtgtatcagctgaatgccttcagctacaaataacagaaaatccaactcaaaatggaactttatcttaacctacttagttagcaaatgggttaatttacttggtgatgtatgttctgtattctcaaaataaggaaaatatgtttcatacataataagaggtcaagaggtaagatcatcccaggcttgattaattccttcgcctcgtgatatcatcaaaggctccagtttttccaccttcctgctctataagagaattaacagtatgttaattctgccttcatcataccaagcagcctgccaaagttctaagactgaggctgactgccttcatcataccaagaagcctgccaaagttctaagacttataagcagctggcagtgtccagacacagaagaggaatggtcctttccctgtgcctcttttgtagagaaaggaaaatctctaccagtttcctacagaccttttgtgtttatttcacaaaaattgtgtcatgtccatgcctaaaccagtcagctgagcaagaagaataagaccaaagtgactactttgtaatattttgtaaacatgtccatacaatagttactacttttttttagtgactggactagaattaccaatatttttccccaggtgttagagaaggccccagttccctaagaagggtgtggctttaaagaggataaagaaaatgcaggcttctcttggcaatagagtagttattggtagaagctgttataatttccatgccaaagacaggaaaatcagggcttagaaaggttaaataacatgcctgaagtcacagggctagtacaatggcaaatgaggccttcaacaaagtcagcccaaagtataaactggtaaggtacctaatttctattgtaattctggataaaatgtgcaccattttttttattaaaagaaataactcatccaggacaccaaaataatttaatacccatagataggaattgggcatattctgtttctgattttcagtttagtgtgtttggcctaattttctgtttgcttctccatccctgcttttgtttgcccctgaacgtaagtgatacttatttctaaaaattgcaggcatcatcctaccaggacatgctgaaattctacctttattaaaccatctcttattaagatggaagtgagacgatcattagcttattccactaatactgtattggtaccatgactcttagagtttgtgttttgttttgttttcatgtctcatagttttaaaatttcattatagcttttacatctgaacattttgcatcaccaaatatttatatctgtagggggttataaatatgtttaatataatgtctgtaacatcagaaagcttactattgtagatataagctagaaacacttaatgctaaatcactaacagttgagataaaataatagacaggccactgttgtatacatggaaaaaatatactggccttgatcttggaatgtttcattcttggataatagttttattacactctaagcctaagtttcctccaaaaaaaaagaaaccagaaatagtgccattttacagttttgttacaaggatcaaatgaggtatatgacaaaatccatagttattaagagtatgtttgtgtgtgtgtgtgtattagagtaagccacaagacagtatatagttgtctaattattgtactatgctgaaaagagctctaagtctacatctgtgtccttcaggaagagagtgaggtctgtcatggacacaggaagagaggtgggaggtgggagagagtctgcatgccatggatttgtcatctctgtgctaggcacttgaggaaggtgaggaaaaagtcctcatggttcagtgatgagccagcaatacattgtttacttttttattttttatggataataagtttcagttaaatgcaggtaatttagaattattttttataacctgtagctctgctcttggtttaaaggtaatgtcttgttttaaaaggaaacagacagcagtgaagatgaggatattattggaccaatgcctgcaaaaggaccagttaactataatgtaacgacagagtttgaaaaaagggcccagagaatgaaagaaaaactgaccaaaggagatgatgtaagttttaaaaacactttaagaaatacactaaatagattaaaaatctaaattttagaaataaacactaaactatataacttttaatatattttgtttttatgcataacatttttttaaatttaggagttagaacccagaaactctaaaagaaaaataacaaattggatgaacgtctttgtaacttatatgacaaatatatgtgacaaaaacatcgatcctttatattagagtttgttaagtaactttaaaacttcaattgcatgacacagttgcttgtacatatatatgtactcatcttatacacgatatgtactttctatgctgtgttttttttttctcttaaaggattcatctaaacccattgtaagagagtcatggatgactgaacttcctccagaaatgaaagactttggtcttgggccaaggacttttaagagaagagctgatgacacatctggagatcgatcaatctggacagatactccagctgatagggaaaggaaagctaaggtgagaggttttgtttgtttgttcatgtatttctgttcatgttggctggattttgaaaagatataatgcaaaattatttaagggtactattttttaaaattatgattccaaaaggataatgcggattttcctctggaggaagagtatgaggaaggaaagtgacaccaattgcttgctgtttacttactatttcccaataaacggtctcatttaaacctcaagaaaactctgagacataggtataatggccttattttatagatggagaaactatcctctatgaggtcaacgtttctagggtcacaaagctagtaagtgatgaaaaataatttcattttagacctttctagctccagattccctggtctttttacaccatactatctttatgaacatatatcttttaaaatattttagaaaaaaaaaacaaagctgcagattaacctagcaaattaaatggtgcctagagaatttctctcaaaatgaccatatctcaggtgcactaagcttcatgttactgtcaagatagacaagaaccactgtcattaatacagtaagttatccaaaaaataccagccggccgcagtggctcatgcctgtaatcccagcactttccaaggccaaggcagggcggatcacctgaagtcaggagttcgagaccagcctggccaacatggtgaaaccctgtctctactaaaaataaaaaaattagccaggcgcggtggcatgtgcctataatcccagctacttggaaagctgaggcaggagaatcactcaaacccgggaggcagaggttgcagtgagccaagattgcgccgctgcactccagcctgggcaacagagcgagactccatctcaaaaaaaaacaaaaaaacaaaaatctgtatgcataaaatacattatttttaatcttctgttcttgaatctttttctgtttattacaaaatatttcattgtatattaggaattaaaccagtatccccagtactactccttcaatttaatccatctgtgggttttggttttttctttttggtttttttgtttggttgtttgttttttaagagacaaggtctctctgtcacccaggttggactgcagtggtgcaatcacagctcactgcagtctcaaaggatcaaccctcttgggctcaggtgatcctcctgcctcagcctcctgaggagctgagactacaggcacacaactaattttttttattttttatttttgtaaagacaaggccttgctatgttgttcaggctagtctcaaactcctgggctcaagcaatcctcccaaagtgctgggattacaggcgtgagccgctgtgcgcagcctctctctaaaggttttaatttctgtaagacatcccattcaattctcaaatgcttgactaattgtcaccttatgattataaattcatcagttctgactaaagcagttccacacttagttcattccactagctctgtttgtattactcatcagtacctagaattgtcaggatttctgttttcaatctgtaatgatcaattttcctgttttgtcaggaattgtatttggtttcaggtgatagaaagagtcaagagctccttaaggactttccattttagtggataattgcctgtgaaataaacagtggtacccttaaagtgtggagggcatgtttcagtctccacacttgagcactctgcctgcatattgggcaacattatacataatttcttttttgtcctaagattaaagagaatctgagagttataataggaaggtgaggtgaaccaacacatataggggcaggagaggcagcaaaggatgtggatccaagagagccacaaaaaccttgaaagggtggtgttggaatgcctattatttcttagctggttttgaaataataattatttattggagtttttataatttggcctttaagattgtctccaaaaagacaattaattcccttgcttacatgcctttttatttgtgtccatatttatttgttcttttttatatcctgtttctcattggagatgaatagatgtctagcttacagccagatatgtagggagtcttccttggaggaaaatatcatggaataatggaacatatggaaaccaggctatattgtttgaacttaagagattttaatccctatgactgagttctttagacctggtcattcttttctgtgctgaaatgttttgtttagtatttgcagtggactcataaagggattaataagtcttaaattttatataatactacattacagaatatagtaccacagacatatatttatgtcacaaactatatagtatcacagagctattcattttctgttgtctttgatcccgtgtaaagttcatgactaatttttataacagatcttagccatatttccttcttgataggttccctccattccatcctacttcttatatttgattttccagcatacctctcatacctctactgttctcacattaatttagccaatatggcctaaaagaagattgctgttgtctgggcgtggtggctcacgcctgtaatcctaacactttgggaggctgaggtgggcggatcacaaggtcaggagatcaagaccatcctggctaacatggtgaaaccctgtctctactaaaaatacaaaaaattagccaggcgtggtggcgggcgcctgtagtcgcagctactcgggaggctgagacaggagaatggcgtgaacccaggaggcagagcttgcagtgagccgagattgtgccactgcactccagcctgggtaacagagcgagactctgtctaaaaaaaaaaaaaaaagattgctctttagaaagtaatgaaaatgttttacatacattaattgaatgagatcagttaagtcctcactttccagtcttgacgatatctactacctcttaatattaaatggttaggtttttatctccattgtaccataacatcacttttctttttttataagtaaaacatctattttctgggaaaatgtagaaatgagctatttctatgtttttaacttactttattaaatacagtgttgttttagtccatgaggcctcctaagcaaataaaaacaatataagaatatgcttagagaccagtggttttcagtagtttttatatgggccttccccattccaatttgggagcatatgctctagaatattcctgtaacatttttttgaattaaaatgtgttagactaggcacttcatgtgtgtgtgctaatataaatgatagttttgtttcaaattccagttgtttcttgctgatatatataaatatatatacatataaatatatacatataaatgtataaatatatacatataaatatatatacatataaatatatatacatataaatatatatacatataaatatatatacatataaatatatatacacatataaatatatacatagaaatatataaatataaatatatacatataaatatatacatataaatatatgtatatatatttatatatatttatatgtatatatatttctatgtatatatttatatatatgtatatatatattttttgagacagaagcttgctctgttgcccaggctggagtgcagtggcaccatctcagttcaatgcaacctttgccttccaggttcaagcaattcttgtgcctcagcctcctgaatagctgggaccacagacactcgccaccacgcccagctaattttttgtattttagtagagacagggtttcaccatgttgcccagggtggtctcgaactcctgagctcaggcaatctgcctgcctctgcctcccaaagtgctaggattgcaggcgtgagctaccacgcccggcctcttgctgctatattttgtatattgatcttgtatcctgcaactttgctatacttgcttagtagttccaggagtttttttagtaaattctttggagtttgctacgcagttcacagtttgctacacagtgctaggatctgtgaataaacacaatttttctttttttttttttttctcaaaatgtacaccttttatttccttttctttgtttttttttccccctccagggtgattttattatttttgaaaacagtaatgtaggatatctttttaagccttattttcacttctacatctcaccactgttaagtcaaactcatcctgagttcaataaataggttgattgagtggagtgggtttttttttccttgttttcaagaaaatcacagactagagcagtaactgatctcttatcaagtatgttaatattttgatttttttttttttttttttttttgagaccgagtctcactctgtctcccaggctggggtgcagtggaacgatttcggctcactgcaacctctgcctcccagattcaagcgattctcctgccttagcctccccagtagctgggattacaggcacccgccaccatgcccagcttttatatttttagtagagatgaggtttcaccatgttgcccaggctggtctcgaactcgtcacctcaggtgattcacccgccttggcctcccaaagtgctaggattacaggcgtgagtcactatgcccggcaaagtatgttaatatttctgatcagaagggatttcacaaacctggcttagttgtgtctcttgttacttaatctaagtaaaaataatatttattttttgttttatcttaatcttatgattcagtaatgtgttatctgtgttcattcctcaggaaacacaagaagcaaggaagtcatccagtaagaaagatgaagaacatatattatcaggaagagataagagactggctgagcaggtatcttcatacaatgtaagtaagaaaataagatatatagagccaggtgtgatggctcttgcctataatcccagctacttgggaggctgaggcaggaggatcacttgagacgaagagttcaaggccagcttgggcaacatagcaagaccttgtttctaaaaacaatttttttaaattagccaactgagttgggaggatcacttgaaggcctccctgcctaatgtctcaaaaaaaaaaaaaaaggaagccagaagcaaaatatatagccttttttcccctatcttttagttatctgtttatttttttctcttttacttatttctctttcttttatatgtctgcctctttaccatgcactttttatacatctatcctgaaatacactatgttgcatatatttttgttttaataaaattcttctgtgtttttcatgaatatttccaattcacattttacgtattaaattagcagaaatctaattattagagataggtagcacttgatgagagaaagcaagacccctactcactcatggagatcttccatttataaatgtttacattataaacagatttggaatgttggatgtaaatatttaaatatgggagaaaaaatgttttttgaatgtagtccaatctaaatttataaactaaacagtcagtattcatttggcatattattttgttatcttctgtcttttaaaaaaatggcaaatgttggatggtgcctgcacaaaaagaaaaaatgataaatgtccccgctcaaagaataaatgtaaattactgaacccattggtccctgaaaggtgtttaggaaaattattttctgttcccagtgtattaaagaaaattccataagctctaaaatatagttagcttgatttatatatgttgaccagtaccacagtgaagcatgcttaaaacattttgggaaattgaccaaaaacgtagccacttgaagtatttatgaaaactgaccagctcagaagtcaaatatcaacaaaatcgaaggaattactatcattcaacccaaattatctgaccacaaagaattgaagtttggattcagaataacttaaaaacccactatggccagatgtagtggctcatgtctataatcccagcactttggaatgctgaggcggacagataggttgagtcaagctatggctgtgccactgcactccaatctggatggcagagtgagaccttgtctcaaaaaaaacataaaaaaaaaaaaacctggaaatcagaaaaactcaaaatttaaactttgcatcaaagaaaaaatgataatggaagttagaaaaatgtagacctgaatgacaaaaatacaacatatcacaatgtgtgggatgccatatgaagcggtatttagagggaaaatttagagccataatgagttatgtaagaaaagaccaatggctaaagataaataagctaagcctttttccaaactggcatttcttatcaaactaaacagacatgtaccctgctattttcctcctgggtatttacctaagacaaatgaaaacatatccacacaaagagttgaacatgttattcttaatagcctcaaaaaaacttatccaagaatgttcatagatgctttattcataatagttaaatactgtaagcagctcaaatgttgatcagtaagagcaagaaaaccaaactgtggtataaatgaaactactcaccaataaaaaggaacacattacaaataaatacaacatggatgaatctcaaaagtcatactgagtgaaagaaatcttacacaagcaagtacatacttcttattatgtttatatagagctgtacaataagcaaaatgcatctatggtgggaaaaaaatcaatgctgatagtcggaataggggtatggaatttgactaggaaacagcatatgcctgaagtgatagaaaggttccagattttgattggagtttgaactataaaactcattgaatatacacttaatatttatgcattttatcatatgtatatttatcttaaatatatatataaaaaaacaaatattgaactcaaatgcatgcttaggtatttagggggacatgtagtgatgtttacagtttactttaaaatgcatccaaaaaattagggttctaatctgaagcctgaaagctgaaattccagatactttctattcaaagtattaatatagtcttaagactaagccactctagaaaccttagcttttgataagtcgagcagtctttaaaatactttaatgaagacaaaaaccaatcaagtagaagtttgacattagttttcaaaagctgttacaaacccatcttattcaaaaattaattgctcttggccaaccatggtggctcacacatgtaatcccagcactttgggggagactgagacgggaggatcttctgaggccaagagatagagaccagcctgggtagtatagcaagaccccatctctaccaaaataaaaaggtgaaaaattagccaggtctggtggcacacactcaaggtcccagctacttgggaggctgaggttggaggatcacttgagcctaggagtttgaggttacagtgagctatgaccacaccactgcactccagtgcagggtctacacagagcaagacctgtctctaaaaaacttttttttaataaataaaaaatgctctaaatattgtatattgttagaaaatgcaaacatttgtgttaaatgattaaatgtggtaagtcagcaaattagtcatttagcagattaatctcttacatcagctggctttcagcttttgattttcagtgagttgactgcttttaggtgttatttattattttattatattttagcactagtttggtcctgtgtgtcacaatatgcaaattatcctaaatcagaccaacagtagtacacctgaaacaactgatataaaagtttatttcttttatcatcatgaatttgagcacttgaattgtttggattgattgtataataatagtccagtgatttaatgtattcctctgtctctattgatgttcaatttactaatataaggaatcagtacattgaaacctgacatctttatttctccatttttgtttgctttttgttaccttacatacaattttgctcatcattataaatcattttcctcagtagtggctttaggtaaagtagtaagatccctacaactccattctttctcacatctccacacatctgctgaaactttgttctctattttctccaggtctttgttatatatttaggccttccgcttccaactcttgttagcctgtcaaccttcatcattactacctcactaaggacttattatctcactagcaaggaaagatgtgaaagcaagggaagggaggagaaatatggagaaatggagctaaaagatcaagttttgatagtgtagcttttttacatttatacatacatataatgctacatatatggttttccatcctaaaattcaccttactacactcctttgtattggcatcctgtctcctattaataccaaactactagaaagaatgatccacaagtaggttccacatcccgtggatcacctctgtcagaacttgggtggtaaaagcaaggtttctgagacccacagttggcagttttgattcactaaatttatgataggacaggcaatctatatttcttttcaacccatcagtgctggagaccagcaatcttcaagtgtttttgcttggtatcccctaaaactctgtgtgtgtgtgtgtgtgtgtgtgtgtgtgtgtgtgtgtgtgtgtgtgtgtgtgtgtgtgttttgagactgagtctcaatcttcaagtgtttttgcttggtatcccctaaaactctgtgtgtgtgtgtgtgtgtgtgtgtgtgtgtgtgtgtgtgtgtgtgttttgagactgagtctcgctctgctccattgcccaggctggagtgcagtggcgcgatctcggcttactgcagtctccacctcctgggtttaagtgattctcctacctcagactcccgaatagctgggactacaggcacatgccaccatactagctaatttttgtatttctagtagagatggggtttcactgtgttagccaggctggtcttgaactcctgacctcaggtcatctgcccaccttggccttccaaagtgctgggattacaggtgtgagccacggcacctggccctaaaactgtgtatttttaaatttgacatctaaaatttttatcataagggccaggcatagtggcttatgcctgtaatcccagcactttgggaggccgaggcaggcagatcgtgaggtcaggagttcaagaccagcctggccaacatggtgaaacccccctctatactaaaaatacaaaaattagctgagcgtggtggcgggcacctgtaatcccagctactcaggaggctgaggcaggaatcacttgaactcaggaggcttgcagtgagccgagaccccgccattgccctccagcctggtgacagagcaagactctgtaaaaaagtaaaatgtaaatttaatttactcttttagtgaaagactttttttctagttagttcctggtctttggatgaatgttacttattgcaagaataagacaggtttcatacaatgtgtactacttggttgactggtacactgaaacttcagacttcaccactgtacaattcatccatgtaaccaaaaaccacttgtacccctaaagctattgaaataaaaatagaaacaaaaaaaattaagacagattttaccatcaattgtgtttttttatacttctaagagttaagaaaccaggtttttatgaagaagtaaatgagaatgaacccattttgttatagcgatgtcattcagttctttgaacaatttgagttattctcttaaacctcatattgatctgtttacaaaaagtattattaatagcctcttaactgtcaagtcattaggatctcctttgattttttttccacattgatcttattaataagttttcttggaaataagatctttccaagtctgtataatgagaataacaacatttaatttacagagatgttgtgaggatatagtaaatgctcaatatatctaacatttagcatttatttattgtttcttatatagccaacactgtactaaatcctgtgtattcattagatcatttaactcctccctccctccctcaaaaatttagaaattattattatgactactaccattttacagctgggaaaatgagacttaaattacttgcccattgttaccagtgttgaaagcagcaggaccatcattgcaatgcagatttttctgaatttggaacttaagttttatttctccatgctccgtgtattgattatctatttttttttttttttaagacagagttttgctcttgttgcccaggctggtgtgcaatggcatgatcttggcttaccgcaacctccacctcctgggttcaggcgattctcctgcctcagcctccaagtagctaggtttacaggcattcgccaccatgcctggctaattttgtatttttagtagagacggggtttctccatgttggtcaggctggtctcgaactcccgacctcaggtgatccacccacctcagcctcccaaagtgctgggattacaggcgtgagccactgcgcccagccttgattacctattttttcttagcaatatttgatgattttttttttatctccttcaattttgttgaacataaagaattggaaagcacttgatttgctaatcagtttgtttctaaagactttatcaatatttataaaatacttaagaagtactttgcttaacccagtatattgagcagaaataggaaaatgtgaatagtgtcaatttaaatacatatttactaatgtatcttttgtacattctgctaaaacgttatggctccagattgagttcagttaatttatgagacatggctgtcacataatctaattgacaaagtcatttctggttgtcagatcagccagaccagacttactttctgattcactttttccattcaaataaatgtgttaatgaccattcatatgacactctgaattctgatctaggtgccattttaccttctagataaaataagatactgtcactttcagcattttttactagtgccttgttattttgctttcactgaggtttcttcactccttccccctcaagtacattctttggcagtaggaagggcctggaagaggtatggttgttaagcaaaaattgtcttttcttccattacccactcttcaatatatctgaattcagaacatttcaataaaaggtaaaatacccatttctaaaggacactacactcttaggagaaatgtgtttcagacacagaaggacacagaaccctcctgtgtttacagtttcttgattaaaggaagtttcaatcataccggtattttaggttttttgtctcataccctgaagacttttgctttcctaaacaatattctatagcctcctttgttaaatgagaaagggctataatgaaagggatggcatcttcacaagaggtagtctaggccaaatcaattgtaagaaagactacatgaagaagtagagaatcatggaaaaatagccttaaaattacccatgccttcatactccatagactctactctctgtagcacccagggatacgtataccccagattgaaggctgctggtctgtactacctgcatctccttttccatctccctccctgctccttccatccaggactgttctatcctttaccttagtcaatactcagtggtctgtagtcaatccctagtttattaaatcaattgtttttgctcagactttgtcttactagatacatctgaaaatgtgaacacctaccctagctaagaagaaaaaaaattgagggaattaagggaaaaagagaacgacagaaaactgaaaggaacaaaaattatcttagcttatggaacatgccaacatatgctgcacaggccttgaattttgccacatccgtgttcttactacttttcttttacctttgtttttgcttcagcctgacagtgcctttccttcctatccgtccatttagccttcaaagaccagcacgtctatgaagtgacaatatgattgctctttctttcacaccccgttcttggtttgtactctgatgtttagtatttaaataaccataatgcttttcattacatattttctttataaatgctgtcttggatttggaaaaaaaaaaactactggggtttgtaaatagccctccttaatgtgcaccattactatctattccgtttcatggtcatattctgtcaataatctatatacaaactatagtttttatttctgctctcctgctctctccaggaatcaaaaagatcagaatctcttatggacatacatcataaaaagttaaagagtaaggctgctgaagacaaaaataagcctcaagagagaataccatttgaccgtgataaagatctcaaggttaatcggtttgatgaagctcagaaaaaagccctaataaaaaaatctagagaactaaacaccagattttcacacggcaaaggcaatatgtttttataagtaagtatatttcagtgaggtatattttaatactgatcaatgtgaacttttctaaatactctattgtctttaataattgtgctgaaatctatttccttttataatagattaaaaattttatatttttataagtaaacagtgatttttgaaaagtcagccttgtgggatgaaaaatatgtcttactggaaaaatccctcataataacctaatagggcattgctattaaaaatgctaaaataaaaattcagcttatgagaaatggcaaaggaaggtgtggtttgatacttgagtaaatatgcatgctttattaaagatgaagaaaggcttgctggttgtttgtatgttaaacaaaatcccaactaggaaatgtttgttgcttagaaaggtcccctataagttaaggttcaaaactattccaatattcatccatagcccaatctgacaagggttcagaatggtgattaagaaattacataaagctgggtgcagtggctcacgcctgtaatcccaacactttgggaggccaatgtgagaggatcgcttgagcccagtagtttgagaccagcctgcttaagatggtgagaccccgtatctacaaaaaactaaccaggtgcagtggagcacacctatagtcccagctactcagcaggctgaggtgggaggatcccttgagcccaggaattcaaggcagcagtgagctgtgattgtgccattgcactccagtctgggcaacaaagtgagacctcgtctctttagaaaaaaaaaaagaggccagtggctcacacctgtaatcccagcactttgggagggtgaggcgggtggatcacctgaggtcaggagttcgagaccagcctgaacaacatggtgaaaccccatctctattaaaaatatatatatataaaaattagccaggtgtggtggcacgtgcctgtaatctcagctacttgggagcctgaggcaggagaattgcttgaacccgggaggtggaggttacagtgagccgagatcgtgccactgcactctagcctaggtgacaagatcgagagactctgtctcaaaaaagaaagaaaaagagaagaaaagaaattacataaaagctgaggttgcttcttaatatctttatgatttttaattgtattaaacctatatcaatattcaaatgtgatttttgaggaaaatatgttaaatttagaaatattttccaacttactgagttttcttattcttacctcagggggatttccctgtgcaatgaagaaaagttgaagaatactctttgtccatctttatttctttgtttttggcttcttaagattagagattactttaatcttaaaaaacatacaaatttaccttgttctgtatgtccttttaaggtcatgtggaaacataaaacgaatgttttttatgtagaacagaatattctatgtgcctttagcttctgtggaagtatggggaattatgggcttttcttcaaataattattttaagaggcttccattccccctgatttttgtggtgtctcacaagtaccctctaaggtctggtcaggactgaccaccaaatctctaccacagcctggacctccttgtgaaatatacctaacctgccctagagtcagtgtgtcaagtccttactgtaaatccatgactttgaaatttgttgttttttccctttaaactgcagccagtgaatacaaatttacttgaaaatagagggtatggggttttgcctgttttgtaatcagtttgcttgttttagcactcagggctttttatttgttatttaattttttaattgtttttaagtcagaaagatctctgggttatctcatgtgctaaggaaaaactattttgctttttccaactttaatagttagtatttctaggggaggcaatcaagataagatatgccattaactgttagcattgtgaaatctgtaagactcaatctctgatctcaaccaaagctttctgagtcctggaactttgctttgggacaactttactttacccatttatatgctgtacttaacagtttgtagctaatttatggggtcatatcttttttttagctaatttacgggggtcatatcagtcatgaatagccttttttaaaaatttaataatccctgaatacaaaaatggaaatggaaaatttataatcataacccccctaattgggagtattataagtttgtaatgctttaagcactgcctcttaagatgataaatttataagatgagaaattctatttaaactattaaactattgttaaataaatgccaattctataagttatattttcttgcagattaatcccaattgttccactagtattctagttttgatgagacacaaatttttgttgttgtttatttttgtttttttgagagatggagtcttgctctgtcacccaggctggagtagagtggcgtgatctcagcttactgcaacctccgcctcctgggttcaagcgattctcctgcctcagtgtcccaagtagctgggactacaggcgtgcaccaccatgctcagctaatttttgtattttttagtagagatggggtttcactatatattgttccaggctggtctcgaactccagacctcaggtgatctacctgcctcggcctcccaaaatgctgggattacaggcatcagccaccatgcctggccaagacacaaatttttaatggaaaaatattctgattcccagttcatgtaagctttatgaaaattgagtatattgtttatatgatggtacaaattattcttcctctaataatagcagtacagtatattttttccatagcatcagtgtaaaccatagcaaactaaaggagcattgctattaaaaagatgaattagctgggcgcagtggctcatacctataatcccagcactttgggaggccgaggtgggtggatcacctgaggtcaggagttcaagaccagcctgaccaacatggtgaaatcctgtctctattaaaaatataaaaattagtcgggcctggtggcgggtgcctgtaatcccagctactcaggaggctgaagcaggataattgcttgaacctaggaggcggaggttgcagtgagccaagatcacaccattgcattccagcctgggcaacaagagtgaaactccatctctaaataaataagtaaataaatagatgaatttttctcctaagcaaattgaaaaagcttcttgtgtactcaaaattgaacagagctaccttttgactaaaaatgtcatttttaatgagcagtattttctgaacacaaaattttgtacaagagtgtctccattgcattaatttaattttgttataattttttcccaatgaaaggaaaaaagtattttgtagctcctcttccttatgtaaattcttaacatatatttttgagaaatttgcattttttaaagtaaaattgttatctttggatacttacttttctttgttttcctcatttaaagagaatagggatatttctgtattatatatttactgtttcatccctcacctttggagtgaccatgaccttggcatgaaggagagaaacctctgctttccgcctattgcttccaggagttactaccttactggccttggagataatgctcttttgtgccaacctgaggataattttaacaaaatgtaaggccagtttcagaggttgttttgccccacagagagactaatcccaatacaagaatattgacaacaaaaggacaaagtagttattgcacaggacggaaaggtgtctttatttcatcccctccccacttccaaagatgcaaaaggcctaattgaatcaagtctcctttccatctggcaggagacattttaataaggactttttaatttcctacatttcttggccaagtgtcataggaatgtggcctcttttgaaatttaaaaatgaagaagaaaaaaagagcaacactaagttaatataatggagcagatacttttaatgttcttaccattgaatatgccatttaagtttgttatacttgaaattatatgatttttgtccagctctctaaattgtcatctccaatagatttagatgcttcaaatagtaaccacattactggtaagtaaacggtggggttattgggtttagcaagtggggaagtaaggggtgaacaaaacacgagagatggtggctacacccctactaagactgccttaccagataaatgaaatcctttttgtattaggcacaacatggtaaattaagtcttgctctaaaaaaaaagaaaaagaaaaaagagaaaagccctgatctaagagtttttagatgctagcaaccttgtttagatgtagatcttgtttagatgtagcaaccacttgacatttaatttatcatcttaaccttgaatgattctttgttttgttttttgttattgagatggagtctcactcttgctgcccaggctggagtgcagtggcgtgatctcggctcactgcaacctccacctcccgagttcaagcgattcttctgcctcagcctcccaagtagctgggactacaggcgcccaccaccgtgcccagctaatttttgtatttttagtagagacggggtttcaccatgttagtcaggctggtctcgaactcctgacctcaggtgatccgcccacctcagcctcccaaagtgctgggattacaggcgtgagccaccgcgcctggcctgaatgattctttgtattaacgatttatttagaagtgaggttgagattggccaggtgcggtggctcacgcctgtaattctagcactttgggaggccaaggcaggcggattgcctgagctcaggagtttgagacccagcctgggcaacatggtgaaaccctgtctctactaaaatacaaaaaattagctgggcatggcggtgtgcgcctgtagtcccagctactcgggaggctgaggcagaagaattgcttgaacccaggaggcggaggttgcagtgagccaagatcgcgccactgcactccagcctgggcgacagagcgagactccatctccaaaaaaaaaaaaaagtgaggttgagatttgcatggtaccaaggcttacatgcttcagaatagatcaatggttattgtataagtaattttatcctaaaacattatgacattttttgtttcttattgagggtagataatgttaatattaaactactaataggaggcccttatcacttctcttttcattttttccatgcagtgataggtattattagaaaaaagttatttcttgagttacacctaagaggaagaagtaacatgatggaaagtggttggagatagcacccaattaacatcgacagccaagtcttctatttcagaatattgatttatttcgctttggcttttgatgccatcatgagatttaagtctgcagtttcaaaagctcatgctacttagatgatttttgcagcttaaaaaattgcttgtgactgcagtatgtacacagttaaaaagctgttcactgcccctttcaaccttttcattttgagctttactaagagaatgcttttaggaacagaattcctaaagtgtaattttttatgtataaataaagttttatctatatctgagaa

SEQ ID NO: 332 - DNA, 21928 bp, Homo sapiens
agaagaaggggagaggaggttgtgtgggacaaggtgctcctgacagaaggtgccagggtgggggtggtgggcctggggcatcctagcctgtgatggagatgggcactgggcaagggattgggcgcacacataggggagccccagccttcccacattctccattgctgcccaaggcccaggcagctcctggttgctggcttggaggatgagtggttttctaactgaaaccaagcccctggcaacgtcctaatgattcaggctgggcctttctggactttaatcagtttctctgtctttctcaatctaagtgcttaccgggtaactggaggccacttggttgctggttttggctgggcctttctggactttacccctcagcccctgtttatccatccctgtttactcttactgttctatctccagcactgcccgtctctgcctctctccactgtccctggagctccctgggcccttccctgggcctcaggacctcactcaccaccccatctgccctgcaggatgccacagctgagcctgtcctcgctgggcctttggccaatggcagcatccccgtggctgctcctgctgctggttggggcctcctggctcctggcccgcatcctggcctggacctataccttctatgacaactgctgccgcctccggtgtttcccgcaacccccgaaacggaattggttcttgggtcacctgggcctggtgagtgtggcagcaggacgggtctggggtctcagggtggatggacttcctgaggggtaagaatgaggctcaggtgagagggggtgggctggggtctggggtggcagagaagcaggggaggcgtcttactcattcctctgcttactcatttctgtgaggtgccaacccaagcccttctcacctccctgttctcccactcttggcctgtgttgaatccttttcctgcctgtctttccacattaatgcacctctgcggggctcttgggcagggggttgggtgcacagaaaggtgaacccctggcgttcccacattctccattgctggactcgaggcctcctgtacccactgttcagggtcctctccctacctggcctatttcctcttatgagggtataggtgggccagaggagaggtgtgggctgtctctcacctccaccacatccggaggcaccttcctcttatcttgttcctccccagtaagatgtcccaatggggtcctgttgccaaacccacataaaagttggccactcacttcccctttcagaagccttccctgacctttctcctcccccagaccttgccctctgacttagacctgctctcccctttgcggaacgtggtctcaatctgctcattgcaaatggcaggattgatgggtgtgtccacaggtgaagtgggagggtgcacaggatgcactagcacagagcctggtgcagaagcttctcccaggtgggagccactgtcatgatggacagttagagtcacctctgctcccctagtgactgctgagaagggaaggtcccctgtgtgcagaaccttctccatgggaggaactggaacctgtgtggctggtggaggaaccagccagggcatgaagggatgtggggaccagccttagggacatgtcctgagtccacactgctccccacaaacctcccctgtgaggacctcctcatatgcccacctctgggctgaaatgactcccagaacaaggaaatttttcctctcaagctaagtgggcctctgtgagtggacagtgtgtcttttccttctgccttgggatgcgctcttgggacttgggggtggccccaagagagatagagcaggaggaatgtagacagatagataggtaataggatagatggatggatggatgcacagatagggtgaatagatggctggctggctggataagtaggtgggtagatagacagatagatagatagataacaggatagatggatggatggacagatggatgcatggataagatggatggatggatggatggatggatggatggatggataatacatacataaagtagtagataagatggatacattaggtggatagataggtagagtggatatgtaggatggatagattagatggatggatagatagctagatgattgatagataataggataaatggatgagtggatgaatgtacagataagatggatggatggatggatggatgggcagatagatatatagatagaaaagttagataggatgaatagattagatagataaatgaatagatagataggtaggtagatagataataggctagatggatgaatggatgcacagataggatagatgaatggatagatagacagatatataagatagaatggatggattagatagatggatagatacatagaaacataggtagatagatagattagatagatagatagatagacagatagatacatacatacatacatatatagatacatagataggtagatatgtagagatatatataggtaaatagatagatagatagatagatagatagatagatagatagatagatagatagacagacaggcagacagacagatagatagatagaagagggagtttatttcgggaattggctcacaggattatagaagctgagatgcgtcatggactgctgtctgcaggctggataaacagacactggttgtgtaactgagtccaaaggcctgagacggtggagttctggtgtccaagggcaggagaagatggatgtgccagccccacaacagagcaaattagcctttcctctgcatttttgtgctacctgggctctcaacagattgaatgagctctgcccacactggggagggtgattcttccttcctcagtttaccaaattgaatgccagtctcttctggaaacaccctcacagacggatgatcaactatctgggcatcctttagcccagtcaagtggacacctagaattaaccatgacaggaggtgacggcccctgccttgcttgcaggtcacccccacggagcagggcatgagggtcctgactcagctggtggccacctacccccagggctttaaggtctggatgggccccatcttccccgtcatccgtttttgccaccccaacatcatccggtctgtcatcaacgcctcaggtaccacctggaatacttggtggtgggtgctatggtgcatttgaggcctgcaagtccctctatccccaagccgtgtgtggcccctgcagtactctggtctctcctttccttctctctcagccatcttcatctttctttcatgtattcactaattcccatctcagcatctcctctctccattgccatctgaccccctgtcctggtgttctgggctgccctggggccccaagagacctcaacccaaggccctgtcctggaggaacccccaagcttaaggaggtggatgtggacagagacatccccaacttcatggggtcaagaaagggccagagggagatggatgacagcccagagaagagcaagttctctgctggggcaggctggaagccttcctggaggaagagttactggagccatgtctggaacaatgagtagggatgtttgaaaggagagtgcagggtgatgcaattgggcatcgttagtgttcaaggccccttgccaggtctagcgtcaccttgcctgtcacaaaggttagaacaatgaggacttgtggctggtggaggatctggactgttatttctgtgatgtccatctctggtgtgggtcaagtccttttaccccatcctgtagtttgtctgccctaagttcattgcttttctgctctaggccctgggaatctccaaaaggagactccagcctagtttggggccctctccttgacccctgtgcttcccttcttggacaggccaggctgagcagggaaacaggcagcatcctacagagaccatggctctggcctcaaaatgctgagtgactctgggctggttcccagctgtctctggttactgaggtctctttcagttgtgagtggtggaaatccaacctggtgtagtctaagcaaagaaagagaatctattgattttaaagtccagggaggatggccttcaggcatggctggatccaggtctcacacagtgttacttcctctcttggctttagctttctccacgccacttttggcttgtcttcctttcttggctttagctttttccacgccacttttgctttcaagacagtctttccctcatgacgtcaacaatgagtcctagaagctcaattctcatgggaaagcccacatttcccccagagttcccagaaaaggcccatgatttacttctcctggcctggatcaccagatcaatttttcacccagtccctgtgtttctgattgcctagtctcggcaggcctgggccttctagagctactgttttgggggcacaaagaagtttgatggttaaggaatcaggccatgggtgcagatagacccagtctcaggcctcaggtttgccatggtctgggactatgggcaaattactttatcatttagagcctcagtctcttcatctggaaaatgggatgaatgagagcccagggaacatggtgtgtggatccacatggggaaagagcttttctgtctgtgtaactgaaggactggagagtcctgcatggaggatgtgaggaggaagcccagtgggggctcagcactgagagggagatgagatgctgcttgaaattctcagggagagggcttccacctcttccctgcagatccttctctctcgcagcctaggagagcatgaattgggtcctgtgtctttctctccagattcacagctcggaggaaggtctcctatacacacaaagcctggcatgcaccttcggtgatatgtgctgctggtgggtggggccctggcacgcaatcgtccgcatcttccaccccacctacatcaagcctgtgctctttgctccaggtagacactgcactggccactccaggtagacactgcactggccacgccttgcccacagctggggtctctgtgctgcctccagcgggtcgcgtgcccatgtgcagacaggaggggctgtggtggagatgccactgcttccatctcccctggacttccatctgtctgacctctgttcctgtttgctcatgtctgggaagtgtctctatggtggctgttatatggtcaagtctgctgtacggctacgtcttgtcacctgtatatttacacctgggtcctggttacacctgaaatatgttatacccggttacatctggtatatcattccaactgaggtcatgtagagctggtcatgtgtggagttcatgtgtggccaaggacatttggggcatgtgaggggctgttttgttcttgtcgcaggtgctgtttgacactgccgttttctcctgctggtcacatctgggccatgtttgggggttgtgtgaggtctgggacccagggtccctaagtgaactgtctgagacattatttgagtcttgtctgaggcatgtgttgtagtatgtttgggtcatacgtgaggaacagtctgggtcacgtgttggctatgtctgggtcgttaaaggtaccatatttatattcaacctggagcctgtatgtggaacacgcttttaaggtcatgttagaccatctcatgtgcatgttagagcataccatctcatgttaggaattgtcatgtattttgtggccatgtcaggacttgtgaacacatgtcagtgtcatgtctcatgtctaggtccatgtcagaagatgccatgtgagaatatgtcagagagtgctgggacagacagggtgtcctaagtccttgtgaaggcattctgtagagtgctgagcgtgttcagggtttgcagaacatgttggatcatgtaggaggcatgtcaaggcatgctggagccctgacatagctcctacgtgccatgttaggcagtgtcattgctgtgctgtgctgccgtagcctggtctggtcttccctcccctcccccatcctgccttcttcctctccccttgaccctcttcttgctatgtggggcttggagggaagaagtgcaaacctcttgctgggagcctccccccacccccaaagttcctccttcacctgcctccatggcccctgattgtcctcatttatgtcagctgccattgtaccaaaggacaaggtcttctacagcttcctgaagccctggctgggtgagtatctgtaggtgaacagggttgggaacaacctggggggccaggggagggagatgcccttgcccatggcccttggctgccctgccaggggatgggctcctgctgagtgctggtgaaaagtggagccgccaccgtcggatgctgacgcctgccttccatttcaacatcctgaagccctatatgaagattttcaatgagagtgtgaacatcatgcatgtgagttatttgaagccaaggtcccagctgcagcctttggttggggggaaccacagacagatctagtctggaattttggctctgctgggtgcctctgggccattgtcttcctctctgagctttggtttcctcatctgtaaaatccctacttaaaagaaggtcaaggtgatgtagtggagtcatgtctctggcgcatagtaggtgcccagaaggtgtctgtttctatgttcgcgtcacccgaaccctgtaaactcaagagggtaatgacaacaattgcataatagctgttgctgataagaaacaacctgaaaactcattggtttaaaccaataaaggtttatgaatcctgataagtctgtgggacagttcgtggattcttctggatgtggatggaagggatcagtcatggtacatgagcagcctggggtcaggtaggcagccttgctggtgttggctgagttctctcacatgtttgggttttggctggcttcagaccgatacagatggcctcagcttagacccctggatgttcctccatctgattctctccctccagaaggagtcccatggtttacaatacagatagggttccagggaataagatgaggcttagcttcattagttatcacctcatcatttttaccacattgtattttgacatcaaaagccaatagtccaacacggaatcaatggcagggggtaaaataggctctgtctattattgggagttgctgaaaaagcacattgcaaagggtgtggatatggggagaagggaagaattggggcgaaggttttgtgaagtgtttagaattttttaactttaaaattgatgttaagctagttactgtttcataaattattctggaagaacaagaaactcctgggtcagagacaaaggatagttttactactcatgacacagagagcagcatgtgttgcttgttagattgcacttcttctccaagcctctcaaatcccatgggctgacacaagtgggcttctataaatgcctgctgacatcatatattgcattacagggaaggggcattaggcttaggaatctgtttttatagcaagcagaagcagcatatccagggggtgtcccttatcctcaaagttattttctgcaaacacaactctgagaaatttttcaagttaagaacatcagcgtgttgcatttgtgacatgcccagaaagggtgctcaggactcatggaggactacctctacaaacctaggatatttttataatcaatttataactgcagatgaggaaacccaacatttattgagaactcacaatatgccagaaaaaatgccatgtgcccattccatgatacgagtatatattgtctaatttgattttaacaactctgcaaaggagagattatgtatttctgccccatggtagatgatgaaactgcaggtctgagagattagggagctaacccaagttcacccagctaatgagtgagcttggcatggtggagcagagtttctaacatgaattatatggctccaaagcacatcatcttaactgttcctgaatatctgacaggtgggatataggggagggtaatgagttgactaatggcacacagagcacagaggacagagctggaacttgaacctaggtctcctgactcccaatcttgggtcttcatctcttaatagtaacagcttttgcttgcaccataacctggtgctcccgggtaaagggtccctggggagaagatgaagaggcttattctggggcgtgcatattgattgttggggttggagagctgctcaagggagcaagggacctgccccagctctgtccccttctctggctaggccaagtggcagctcctggcctcagagggtagtgcccgtctggacatgtttgagcacatcagcctcatgaccttggacagtctgcagaaatgtgtcttcagctttgacagccattgccaggagtaagttcttgcccagggtctgggatcctgggccgtggacacaaagttggtaggtggggggctggggaggactgagcagggaaatcagacaaaccttcttggaggagttgttatacctgatcgttgaaggactggtatgaattttatcttgaggtttccagggactcattaaaagggtttgaactggtgggtgtggtcaaagtgggtctctctcagggactgactgtaatgtagcactaaatggagttaacactgatgcaaagaagctagggtggaagctggaccatggaccagttggaagaggataaagtctgagctttgtggacagcttcaggaaggagaaggggcaagactgtatactgggagggagagagggaataggagcataatgtgcaaactatcctctgggtgcctagctgcatggaggcatctcacagagatgggatgcagggagagataagagagcctggagagtcgatttcatgctgatccccatcctgcatctgaggggccatctgttcctggataccccgtttactgataggaggtagctcctagctgctggtgggaggtgatcctggggcttcaggtgtattaaattgttgcctccctttctgcccttatcctgcaggaagcccagtgaatatattgccgccatcttggagctcagtgcccttgtgacaaaaagacaccagcagatcctcctgtacatagacttcctgtattatctcacccctgatgggcagcgtttccgcagggcctgccgcctggtgcacgacttcacagatgccgtcatccaggagcggcgccgcaccctccctagccagggtgttgatgacttcctccaagccaaggccaaatccaagactttggacttcattgatgtactcctgctgagcaaggtgggcctctctgggatctgaattcaagaagtagaagggagcttcatgtgaaatgtcagatgaaagaatttgaacttgacccagagggcactggggagccatggaaggtgattgaggaagggagggacaggtcagagataggttttggagatagctctgtggactagcacctaccaggggactgctaaatgaaattgtgatgagtctgagatttactctatttataagttaataagctaattggccaccttttaatctatatatctacatctatacctatgtctgggtctatgtttatgtttttgcctatgtctttctgtatctttgtctctgagtttgtgtctctctctatgactatgactatgtctatgtctttgtctttttcattggccatatctgtatgtctttgtctgcatctgtgtcttcatctttgtttatgtttatgcctttgtgctctccctccctccctgccttctttttctttctttctttctttctttctttctttctttctttctttctttctttctttctttctttctttctttctttcttttccttccttccatctttctttctttctttttctttcgttctttctttctttctttctttctctctcttctctttctttctttctttctttctttctttctttctttctttctttctttctttctttctttttctctctctctctttcctttttttgacggagtctcgctctatcacccaggctgcagtgcaatggcatgattttggctcactggtaacccctgcctcccgggttcaagtgattctcctacctcagcctcccgagtagctaggactacaggggcacgccaccatgcctggctaacttttgcatttttagtagagacgaggtttcaccatgttggccaggctggtcttgaactcctgacttcatgatccatccaccttggcctcccaaagtactgggattacaggcgtgagccactgtgccccaccttgtcatgtcttttctatgtctgtgtttatgtctttttctatatctatattttcgttcttgtctatgtctatgtgtctgtgtctatgtctttttcttttctctgtgtttgtgtctttgtctcagtgtatgtctatgtccatgtttttttgtctgtgtctatgattatgtctatgtcaatgctatatctatatctttgtctttttttttttttgagatggagtctcgctgtgtcacccaggctggagtgcagtggtgcgatctcggcttactgcaacctccgcctcctgggttcaaatgattctcctgcctcagcctcccaactagctgggattagaggcacctggctaattttttgtatttttagtacagacggagcttcactatttttagtctcaaactcctgagctcgtgatctgcctgtctcagcctcccaaagtgctgggattacaggtgtgagccactgcacccggccatatttttgtctttgaatttgcctgtgcctgtgtctgtttttgtctgtccatgtttatgtctatgagtatttgtgtctgtgtctatgtccatgtctatgtttatgtgtatttgtgtgtctgtgtttgtgtctaagtctatgactttttccatgtgtttctgtgtctatgtctgtgtgtctatgtctttgtctatgtgtatgtctgttgtgacagaggcattaaatctctggatcagagcagctcatgtcttgcttacggcaatactatcagccagagtaggattgtggcactgactctccattcccaagtcaaattcctccaagggcaatgcgatgttttcccctgtacgtgcagcagactttgtaccctaggaaaggcaccctatattatgagtctcagcacattttctatagagagagagagagaggaagaaagagagagggcaccagctttgtgagagattatgtgctttgttctggatgccatattccatagacttacaactcaaatgtctccagggagataagattcatttaccactgtagaatgtgggcaaatatctttgaagcaatacttaatctctaatttccaagacaaattgccatttaattatcctgtaacccaggttgccagtgatttttttctcagaaagttttcatcaagcagaaacatgaaagcattcatgggtcattgagtcttcccattagggaccaaagaaaaggcaaggaagccagggaggaagcccatggggttggggctctggccatggtgaccaagaagggtctaggagagcaagatgggcttgggtttctcgaaagaggatgaatcttcagagactgtctcagattagactcaagagccctcagaggtactgtgactttttatgggggtgggggtggggggttattgccttctctccaggatgaagatgggaagaagttgtccgatgaggacataagagcagaagctgacacctttatgtttgagggtgagggccccagtgtggggctagagtggggacttggatatctccattccaggaacagggtgggtggacccctcgcacttcccatcccccttcccccatcctccctgaggtcctcaatgcaaggttgctgtacaccctcgggtgctgaagcagcccagagacccaagcctgccttgctgccccccaggccatgacaccacagccagtggtctctcctgggtcctgtaccaccttgcaaagcacccggaataccaggagcgctgtcggcaggaggtgcaagagcttctgaaggaccgtgagcctaaagagattgaatggtgagtgcaggtgctggtgccctgttcctgagcctgtctcattggctctgttccccaggtagggaggggagaaggggttgtttttgttgattctgccactattgcttagtgggaataggagcagaggaccacaggcaggacttagtacccatcctgactgtctgggcaaaggttataggcccttaggacagaaagacctgggcttctgagagaattgttgatgatatgtgaggacagataacgccacttagcatgtgttcagcaaatgaacttcccctccactctcttccttttctccaagaaatatttttttgaatgtcttcacttgttgaatgtttgctcttctgttccctaattcctacccttccatccagtccagggatttataagggagacctgggggtaaaattcatccattcttgtccagaacacctgcatcattcatccatccagtcctcgttcagcaaatactctcatactgcattccaacccccacatctgtgcacagcatctttctgtgctctggagacctgggaaggacccaaccagggatctattttccaggtgctcccagcctggtgggggaactgtccctgggcaggacagtcccagcccacgtgggcagggatggggtttacagtaagggaagcaggactaggggggtatagaaagtgtctcagttgaaagcctgaataatgatcagtagataattgggtacagttggggagcagtgctgtaggtcaagaagaccacctggggtcttcgggggaggaagagagagaggagagagagagagagagagagagagagagagagagagagagagagagagagcagggtcaggacagaaaggaggagaaggggagaaagagggagagactgacttgtggtgagatgataaaactggagatggtagcaggggctggctgtggaagccttggggaaaatgttaatggcttcagttttagcccaagggcaatagggagccatgagaagtgtttgaacagggagggacaagtcacatctgggtaccaggaagatctttctagggctagtgtggagggtgtactggagaggaccagctatagaatgagagcgcagtggggacattctgaggctcaagccaggccaggggctggaggaaggagaggaagcattggagtggacgggtgtcttggactcagtgtcctcccgtccatgcctttgcccagcacagcagtcctgggaagggaagaaacatttttatgcttctaaaataaagaatatttttgcaattttattttttaaaacacatttttattgatgcataatagatgcacatagttttgaaatacatgtgataatctaatacattcatataattgataaagatcaaatcagtgtacttgggatatccattgcctgaaatatttgtcttttctttatgctagaaacataactaacataagcaaactactttctaatgtacagtacatattgtaaactacagtgaacctactgatctatcaagtgctaggttttatttctcctatcaaaactcaaattcgtacccattaatcaacttctccttatccttccctcccctctgccaatctatcttcttttttcatgagatccactttttcagctcccacacgtgagtgagaacatgcgatatttgtctttctgtttttggcttatttacttaccacaatgacctccagttccatccatgttgccacaaatgacaaaatttcagtcttttaaatggctgaatagtattccattgtgtatacacactacattttctttatacattcatctattgatagacacttaagttgattccatattttcgttgttgtgaatagtgctgcaataaatacagaagtacagatgtctcttccatatatttattttctttctttgggatagaaatttcttctctttcttttcagtagtggaatttctgggttatatggcagttctagttttagtttcttgaggaacctctgtgctgttctctgcagtggctgcactaatttatattcccaccaacagtgtgtgtgagttcccctttctccatatcctcaccagcatctatcattgcctgtctttttgataaaagccattttaactgggatgagatgatatctcattgtggttttgatttgcatttctctgactgttagtgacattgagcatttttccatctacctattggccatttgtatgttttattttaagaaatgtctattcagatcttttgcccattttaaaatcagatatttggttacttttcctattgagttgtttgagctgcttatgtattctggttattaatcgcttgtcagatgagtagtttgtgagtattttctgccattctgtgggttgattcttcgctttgttgattgtttcctttgctgtgcagaagcttttttgcttgatataatctcatttctctattggctctgcttttgaggtcttacatagaaagtctttgcccagacccatgtcccggagtataaaaccaagatttcaagcaaaattatgcgtgtagtttaaaaaaaatggtcgaaagactttatgacaaaaatgaagttccttattaagctccaccttagcggtgactacagtcaacagttctctgtgtattcttctagaaaatggctatcccgatgcccacatttatatgaactcacactgtgacttttatttatatgaacacttactgtgcttttctttgtaagtgaaagtccataaaatagacacgggtctgcatattatctctgagatcttttgcttttctcaaaatatacattttggaaaatgagtttgtttttaaatttgttctttgtctttaattgacaagttttaattatatatgtttagaggcacagtatgatgttgtgatatatgtatacaacctgaaattattaaatcaaggtaatgaacaaatccatcacttcatgtgtttatcatttttgtgttgagaacatttgaagtttactttcttagcaatttcaactaatacaatacattgttcactaaaggcaccaggctgggcagcagatctcaaaaacttattcctgttgtctaactgaagcttctaccctttgaccaacatttcacccttctctgtccctcccccacccctggcctctggtaaccaccattctattcctatttctatgagctcaactattttaggtcccaagataagtaagatcatgtgtgtttgtctcttctgcacctggcttacttcacttagcatgagttcctccaggttcttccatgttgtggcaaatgagataattttttcttttttaaaggctaaatgggattccattgtgtatatatatatatatatacaccacatggaaaaacaacattaaattacaaaatgaatgataaaaaagagttcttcttgtaccaaatgagacattacagataagactagggttttccttgacaatcctgccacctgacctaatcctttctcattctccaaaggtgtttctagagccatagatttgtttatctatctatctatctatctatctatctatctatctatctatctatctatctatttctatcatctatcaatgtatctatcattgatctatctatcatctatcaatgtatctatcatctatctctattatctgtctatctatctatcatctatgtatctctgtatctatcatctatgtaactatgtctccatcatctattatctatctctctacttatttatctacctattatctatgtatctatctatatcatctatttatctatctatctatctatctatctatctatctatctatcatccatccatccatgatctatctctccaccatctatgaatcattcatttttataaatatatatccatatgcttcttgctgttttacatgtacatatgtatatatttgtcactttttttcactcaacagggtgccttaatgctatctttttctgagtgctgtatattttattccatattttattcagctcatttctatgttgaagaggacattaaacattttcaattatagtcaatatttccaatttgccttccagagtgtctgtactgatttaccttctagcctgcagtatgtggtgagactagtgatccctatttccttcttttgtgtaactgtatagtattccattgtgtggctgtttatctaaacattttcccattaatgtatatttggcttgtctccaaacttttgctaaactggacatgaagctgtcagcacgtgtgcacagtgaccattccttacatgcataggcatctctgcaggacaaattctctgaagtgcaattgctgaatcaaagaccatttgcactgtataatcattatttttttgagacagtttcactcttgttgcccaggctggagtgcaatggtgtgatctcagcttactgcagtctctgcctcccagattcaagcaattctgcctcagcctcctgagtagctgggattacaggtgcccccccaccatgcctgggtaattttttttgtagagatggggtttcaccatgttggccaggctggtctcgaactcctaacctcaggtgatctgcctgcctcggtctcccaaagtgctgggattacaggcatgagccaccatacaatatgactgcaaatcctttactattagctgagttttatggcacaaactttcccataactttaccaatagtactattgtattattgaattttaaatcttggccaattttcatatttcttcttttgatggacatttaaaaaaagtaagagtgaggctgaacatcttttgcacgtgttgatgttatttgctttctttttatggaactggtattcttattatttttcctctttttctttggaccctttaaaagtatttacttttaagaatgtgtattaagattgatttttttctgcctagtgttgcaaaatattgccttttaacttttggagggtacttttgattaatttttatgacgttaagtaggtccacatttttctttcacagctgtaaaatccatcaacttcccaggattttgtttagggtgggtgggggcccctttaccaaatgtgaagttttctcttattctcatgtctttttctgagctctttatgctgttccatgggtctattttcttgtttctgcaacagtgtcacactgtttttattcctgcgactttgtaacaattcttttaaaaagtttatttcgttacagggagaaaaggtctcacttgcaaacagagagaagctggagagttgtgtctttgctcccttgataaggattggggctggggtgtttccttagggacgacctggcccagctgcccttcctgaccatgtgcattaaggagagcctgaggctgcatcccccagtccctgccgtctctcgctgctgcacccaagacattgtgctcccagacggccgggtcatccccaaaggtgccacagcctcagggggaggagcctcctgggtaggaagaggggcccctcaggcagggagcattgtcctgactgcccccttctctcccacaggcattatctgcctcatcagtgtttttggaacccatcacaacccagccgtgtggccggaccctgaggtgcgggccccccgtctctgtttttgtccattccaaggctcctagaggagggggcagggttttgatcaggagaatccaacatcacctccctccaagacacacaccactgtctctccaaggctggcggactgggagaccccacccggcaacccttcttggtctcgcctccaggtctatgacccctttcgctttgacccaaagaacatcaaggagaggtcacctctggcttttattcccttctcagcagggcccaggtaagagcggcctgtgtttgaggcggggacggggagataggtgcaggggtctgggcatgacagtggggaaaagggggacattgtagacggtccgagttccagctctccttccctcacctcctctggagtttatgggaaaaggcccacagagtaggattgggttggtcctagaaggatccctagtgagctcagagctccctcctaccccaccttggtctaggctggggggttggagctcggctaggctcgcaggatatgcaagcccacatggggatccaggcacggatacccccttctctgttcctcaaactgctctaggtggggttgggtgtcccaggccaggttaccggcttgatggggccaggatggggcacctgggtgcagtcagagtttccacctccctccccaaggaactgcatcgggcaggcgttcgcgatggcggagatgaaggtggtcctggggctcacgctgctgcgcttccgcgtcctgcctgaccacaccgagccccgcaggaagccggagctggtcctgcgcgcagagggcggactttggctgcgggtggagcccctgagctgagttctgcagagacccactctgaccccactaaaatgacccctgattcatcaaaagtgaggcctagaattaccctaagaccctgttccacagtcctgtattccatcctagatatctactcaaaataattgagacaagtgttcaaacagaaagacgcttgtgcgtgaatgttcatggcagccctattcacagtagccaaacgatgaaaacaaccccaagctatatattaccagatgaaaggataaacaaaatatggtccatccatacaatggagtattacacagccataaaaaggaatgaagcagtgatccccactacactgtggatgaaccttgaatgcatgatactgaatgaaagacatcagatgcaaaaggtcacatagtgtactgtccttttatatgaaatttccagaacaggccaatctgaagagatgtatagtggattggtggctttcagcagctgtggggaggtgggactgaggagcgactgctaatcaggatggggtttcctcctgggatggtgaaaatgttccggacctagatagtgatgaaggtagcacgacactgtgagtgcactaaatgctattgaattggacactttagaatggttgaaatagtgatttttatgtgaattctacctaaacatgctattacagctcatatatactttttccatctggattcttcacaaaagaatatgttgtgagcatctttccatgatattaaatcatcttaggaaacattattttgtgttcttcaaaatgtgcatgttaagtattcaaatcagtcttaaatttttaaaaatatgtaattttagaaaataatttaaaaggttttgtttcagtttgtaagatttcttttctggcactttaatggcttgaggtatcattatcagttacaaattgagttattcttcatcaaatgacttttggagtagagattttatttttatagcaatagatgcacagatattcctgtaagatacaggtgtggttagacacttttctagaacaggcatgccctgcaaactccacagacactgactgtttttgtcctattaagaagtagaccactgagaagggagaaggtgacattttagctttcccaggtaaaagtggttttcatcctcacaccaattttatggactggacgttaactctcttgctcaaggtcactctgagtggaagagtggggataaatctggttcgtttggcatcagaggccatgacttttcctaccacagaagtaattttcaaagtaagtctctgccctaggcacatcagatcacctggggaccactccagagtgagtagacaagactttgacaggggtgcctaatttttttttttttttgagatggagtctcgctctgttgcccaggctggagtgcagtggcatgatctcagttcactgcaacctccgcctcctgcgttcaagtgattgtcctgtctcagcctcccaagtagctgggattacaggcacccaccaccacatccagctaattgttgtatttttaatagaggcggggtttcgccatgttgcactggctggtgttgaactcctaacctcaggtgatccacccgcctcggcctcccaaagtgctgggattacaggcccggtccagtttgatagtttgttatcatgttatacgtacacttagaataatgatccagccatctcattctaacagcaatgagaacttaggctcccctctctactaaaatacaaaagttagctggtcatggtggtgcgggcctgtaatcccagctactcgggaggctgatgcgggagaatcacttgaaacccacaggcggaggttgcagtgagctgaggtggtgccactacgctccagcctgggggagggggacatagcgagactcggtctcaaaaacaaaacaaaacaaaacaaaacaaaacaaaaacaaaacaaaacaaaacaaaacactgccaaactgtttccaaagcatctgcatcgtgtttaatttccataagtaacgtatgagaattctaggtcctccaaataattagcagtccttcgtagtgtcagtttttgtttcagccttccttatgggtatgctgtggcatatccctgagattttaattcgcattttccagtgactaagggtgttgaaccactcgtgccttcctgtgcctatttgacactcctatattttctttggtgaagtgtctgttcaatcatctgctcattaaattttccttcggttgtttgccttcttattgttggattttgagagttctatgtacaagtcctttgtcagtcgtgtgatttgcaagtcttcttcctagtctctgaagtttctttctttcatagagcaaacgttttaaatttttatgaagtaagacttctcagttttatttttggtgaattatgtttatactgccatatataggaactctttgcttaactggaggtcatggagattttctcctacattttcttttaaaagttttatagtttcagagtttacatgtaattccataatctccatttagttaaattttgtatggggtgtgaactgtggtttgactgttttcttgtatatggatatccaattgtttcacacaatttttttgaaaagaatatccttggcagggcacggtagctcacacctgtaatcccagcactttaggaggtcaaggtgggcagatcatgaggtcaggagtttgagaccagcctggccaatatggtgaaaccacgtctctattaaaaatagaaaaattagccaggcgtggtggtgtgtgcctgtattcacagctgcttggatggctgaggcaggagaatcgcttgaacccaggagtcagaggtttcagtgagccgagattgtgccactgcactccagcctgggtgaaagagctagattctctctctcaaaaaaaaaaaaaaaaaaaaggaaagaaagaaagaaaagaaaagaaaatcctttttgctttaacttgccttgcaggtttgtagaaaactcaattgttgaaatttgggtggatatatttctggattttctattctattccatgttggaccaataccacactgccctagtcactgttgcattatagtatatctttaaaggagtaatgggaatccttcaactacattttttccccaataatttttggctattctgcttcctttgtgtttctatgtaaattttatcatcagtgtgtctatttctacaaatagtcctgatagggtttgaattgggatttctgtgaatctatagatcaatctgaggagacttaataatgatattgattctcccaattcatgaatatagtatacccctgtatttatttgttttcttgaatttcttttatcattgttttgtagttttcaccatgacagtcttgcacatattttgttaaatgtacagctgagaatttaattttttctggtgtacaatgctaataaaatggtgctttaaaag

SEQ ID NO: 333 - DNA, 32803 bp, Homo sapiens
atccgacagccgcgggtgcgtggtcgtgcggcaagtgagcgatttggtgaacagacactcccttctgtaggtaagaatatctcggggggcgaattaattgaagaagcaccgtcatccctcggtcttagcagtgtcgcctctctcttcccgggtttggagagctgggggcgggttcctggctctgcgggcctgggctacactctgagccgcgtgaggagctctccccctacgccgcagcccgcgtgctgggattcacccaagtgggtttgtctggaattcccatttgcagccttctggaagcgcagattaaataaaatcatgattcccgtaaagtgccagcacctcctatggttacatcccacgttcacagattttaactgaaaaggcattttagcatagaattccaaattccaatccaaggatggagaaaaggtccttcctagtgggaaaaaggaaggtgagtttgaatttaagagagcaggggcttttttgggaaccacttgaaatttagttaattgaaactaaaagaaaacgcaactacaccttacaaaaacactgctggaaaggatacctaagtcatcaaataataaatagtgtgacagctgtttaccaaatcaatgtcgctgccgcaaatgtgcaaaaggttgggactttcggagtgcttcaagtttgaaaaaggtaaaggaataatgttttctaaaagtactctcaggccaggcgcagtggctcacgcctgtaatcccagcactttgggaggctgagcggggcggattgcttgaggtcaggaattcgagaccagcttggccctgggatgaaaccccgtctctactaaaaaggcaaaaattagccgggcatggtggcgggtgcctgtaatcccagctacactggaggctgaggctgaagaatggcttgaacttgggaggcgaaggttgcagtgagccaagattgcaccactgcactccagcctgggcgacccagcaagattctgcctcaaaaaaaaaaaaaaaaaaaaaaaaaaagcactctcatgtgttttgctcctatcaatattgaaacattggtgtctcctgtggcaaaaggtgtttttttcatcgaggcacatatattaaatagaccaaaacataacttcccaaatatcttataagattatcctagtagtagctgaaatggacaaaaataccaatttccttcagtcattattgctaatagaccaacaacactcttttaaggttgtgtaatggtaaatgcatacacatttatttaacatgcacacagggagaatcagagtgattgattacccaccctgcaacatgtctcagaagcttatagactaccctggcaaatgaggttacgggagggagccgaagagcatccagcagaagtggatgggcttctgctagggagcatgaatgggtcaggggagagaataagctacattatcttgtgaatgggtctgttcaggtgtggggtatattcttggtcttacagggaagggaaaagaaacagttgttccttttggtgggtctggatcttaggcagacaaaggtttttttgagctgggagccgggaaggtcagagagaccttgaggtctccagcatgtcaaagccccatattttggggtatcggcttctgagtcccggcacttattagtgacgaaactgatgagtctgtagtagccagatcaaagaagaacccaaagaatgggtacattcgtagatcaggaatattgaataatgaaatatagatcaggaatattgaaactggttttccatgggggaaaggaagactgttgtccttcatgggataaaccttatttgcatgtctatagacaataattacttaacattgccatcagttgttaaaatttacagagttgtaaaatagctcaaatgacctctaatttttctttaatccagttttttccctacaacaccaccttctctcagtgcatttaatcagaaactttcactgcatctcaaggattagatgtcagctgactttccttttttgttttgttttgtttggggtttttgaaattttttttttttttttttttttttgagacggagtctcgctcttgttgcccaggctggagtgcagtggctgggatctcggctcaccgcagccttgactttccctgttcaagcaatcttcccacttcagtctcccaactacctggcactataggcacacaccaccatgcctagctaatttttgtattttttatagaggtgaggtctcgctattttgcccaggctgggctcagttgactttctaagccgttttatgtttttcttagttttatggttttcttaggcatattcctcctgctctccctaagactagattgatctgaacatagacataacagaataaacagaatttggaaggaaatgattaatttaccagcaaacacctcatgcaaattaaaaggaatggtaccatatatgataaaataaaatctgaagcatcttaaagatcacttgggctgggtgcggtggctcacacctgtaatcccagcactttgggaggccaaggcaggcggatttcttgaggccaggagttcaagagtagcctggccaacatggcaaagccccatctttactaaaaataaaattttaaaaatatcacttgtttctgctcttacaaaaacaaacaacagaactattctggcccacatactgaatatctgggtctagtttacgtctttggaagttgtgtggcatgctttatttcagcaaagatttttttttggggggggtgtggggtttgacataaaggattatagatgggtgataaggctactttgtagttttttgagagtctaggtcacttagcacaaaattctatagaagctaaattaggtgactttagtaagaatagtcagggcaaggccaggcacggcggctcacacctgtaatcccagcactttgagtggctgaggcgggtggagcacttgaggtcaggagttcaaaaccagcctgaccaacaaggcaaaaccctgtctctactaaaaatacaaaaattagccaggcctggtggcgggtgcctgtggtctcagctactcaggagactgaggtgggagaatcgcttgaacccaggaggcagtggttgcggtgagtggggagattgtgccactacactccagactccagcctgggtgacagagggagactctgtctcaaaaaaaaaaaaaaaaaaaaaaagaatagtcagggaaaggtgttattcatgtatttatctctctaatcacttgtatttcagaaagatctggatctgggtgtctgcttttttttttttttttttttggatgggatttcaaatgtcatcggctgcagaagagggtgggccccagtacataaagccaccagaagtggatgggcttctgcgtataaagctattgctcttggcagctctgtctgaaggaggaggacaagagactccagggtatggaaagggattttcatagtggcgggcagcaggaaggagcagaagttggacctgaaggcaggaagccagcttggttctagaaagaaagaaactgggggcacagaaaaaaacaggtaactcaagggatcctcctgcctcagcttctgagattcagattctatctgtattaactgaaaaatgttatatgtggccagacttacaaggtttattgccctgtcctagctttgcgttacgggcactgttttcatcagaaatgttctgggacagactcagtttcaaagatcctgttcagttttcctattatacggaggccttgccctgatgtggactttaaatttaaaatagtcattgcacccctagaaaagtccagagctacagagagttgtacacagtaaaatgctttggaggagggagaataggatgcatttctttaagttgaggtataatctacatacaaacaaagattttaagtgtttataattgtatacacccacataactatatcccatcaagatataggatatttcatcaacccagaaaattgcctcctgcccttttaccatcaattcttacccacccccacctccaagatgaccgtagttgtgatttctatcagcatgaagtagtttcggttgttttggacctggcgtaaatgaaatcttcatgctatgtcctttttgtatctggattcttgtacacaggataatgtttgagactgctttattttcttccgtgtatcagtgatttgttttgttgtttttttttcaaatcatctttgttgaagtacatcttttttttcttaatctgttttctgttgcttataacaatacctgaacgtgggaaatttagaaagaaaagagctttatttcttacagttatggaggctgggaagtccaaggtttagggggcacttctttctaatatggactctaaagaatcccaaggtggcgcaggtatcacatggtcagagggctaaggctgcaagctcagggctttctcttagaaaaccaccagttcccctcccatgatgacccattaatacattaacctttgactccattaattcatgaatgagctaattcattcatgagcacagagcccttatgatctaatcactcttgaaaagccccaccccctcttttttttttttttttttttttacaacagggtctcactgtccagcccaacctggaatgcaatggtgcaatcatggctcactgcagccttgatatcctgggctcaagggattttcctgcctcagcttctcagtagctaggactacaggcatataccaccatgcccagtcatttacttaatttttttgtagaaccgtgttcttgctatcttgaccagtctgatcttgaactcccggcctcaagcaatcctgcctcagcctctcaaagtgctgggattataggtgtgagccactgcacccagcctgggattaagatttaacatgagttttgaagaggacagatattcaaaccctagcagtgtggtttacaaataagaaaatgtatattataagtgtatagtatgaatgcatgagtttggacaaatgtttgtaatcatcaccacaatcaaggtgtagagtgttttggtcaccccaggaagttcccctgcgctctattgcagtcactctcttccctacctcccaccccaggcaaccaccaatccgatttccatcactacagataagttttgcttgttttaggactttatatgttaatgaaatcatacatttttttgtgtctggattccttggcacagcaaatttttctttttatgttcattcacgtatttgcagtagttcactcctttttattgctaattagtattggttgccaaaatttatcattatttattcattccccatttaatggacatttagttgcttctcattttttcacaaatataaatatatgaacattcttggatagattgccaaatgattttccaaagggttggtgccattttacattcgaacaagcaatgtatatggattcacttgctgtaaatctttgccaacatttggtatgctggcctctgtagccattctagtgctagttttctctcctagtcttaacttaggatttctgattacttatgttgagtatctttgcatgtgctcttggccaaccacatcttttgcaaagtatttaaatcttttgttcatctattcttattgagttacaggggttctttattttggagacaattcttttatcagatattgcttttaagactattttctcttcagtctgtggcttccctttctaatttctttgcctttgtgtgtgtgtgtctgtgtgtggtatttttttgtacagacaaaaaaaggtgttgtccaggctggtcttgaactcccaggctcaagtgaccctcctgcttcagcttcccaaagtgctgggattacagtcgtgagccactgcacctggtcccttgccagtttcttaacagtacctcttgagaagcagatgtggctttttttttttttttttttttttttttggagacagagtttcattctgtcgcccaggctggagtgcaatagcgggatctcggctcactacaacctccacctcctgggttcaagcgattcttctacctcagcctcccgagtagctgggattacaggcttgtgccaccacgcctgggtaatttttgtatttttagtagagacggggtttcgccatgttggccaggatggtctcaaactcctgacctcaagtaatccacctacctcggcctcccaaaatgctgggactataggcatgagccacggtgcccagcctcctttccattcagtttcttaacagtacctcttgataagcagatgtggctttttgatgaaatgcaatttatcttttttttcttttaagattctttttattatttcaaatatgtgccagtccctaggtaacgaagatctgtttccttctggatggcatgctgtggtgttagtatttgttatgtcaaattagtttttgtgtatggagtgaggcagtgatcagtaagatgcatttcaagtaagatgaagttacagccagaatacaataactccctagaagttggtggaaccaccttccaatttttattttattttattattttattttattttattttattttatttttttgagacagagtctcgctctgtcacccaggccacaatgcagtggcactatcttggcttactgcagcctccacctcctgggttcaagagattcttgtgcctcagcctcccaagtagctgggagtataggaacccaccaccatgcccagctaattcttttgtatttgtattagagacggggtttcaccattttggccaggctggtctcgaactcctgacctgaggtgatctgcctgtctcagcctcccaaaatgctgggattaaaggcgggagccaccgcgcctggccaccacccactaattctgactgcagcagaacgacggtggttaagcaagaccctggaatcctttcccctgccttccttcaggaccatcttgccctgacttaagctgactgcagccctttgctttatttgaatgttttactgaaagttatattctcttctattttagtaataagcagattaaaaggcataattagtttgtctgctctgatatgtcagctaaaagcaaatatttttgtttttagtaatcagactttgagtttgctctgtctagggaagggcttgactctagcagtgttgaaagcctgggaggtgggctttttggaaactgtaactgatataacataaaatgtatttggtctttaagctaaaacttttgggaattcctgagtaacaggtgtctttttattcataatgaccctctttgataacgtgtttatgctaataagatagcttggagtggggtccatagatagtctaaaaactgggggggaaggagctgaagatcatgctctgtaagattcgtttttcttttttttaatatttaaagagatggggtctctatgttgcccaggcgggtcttgaactggctaatttttatatttttagtacagaccgagttttgccatgttggccaggctggtctcgaactcctaacttcaggtgatccacccgtctcggcctcccaaagtgctgggattacaggtgtaagccaccgcacccagccttattttgtatttttgtagagatggagtctggcaaacatataattaccaatttattgctcttctgtttgaaagaagtgttttgactgcagtaaagttctagcctattgtgaaaatcaggctagcccatttctcagatggctgcctggctagacaccctctctgagatggctggaatgattagtagaaaggagtgggcaggaagtaggtggagagtggggattctagatcaggggtcctatggcctgttaagaacgggccattacagcaggaggtgagtggcgggcaagcaagcattaccacctgagctccgtctcccgtcagatcagtggcggcattagattctcctggaagtgcaaatcctactgtgaactgtgcatgcaagggatctaggttacgagctccttgtgagaatctaatgcctgatgatctgagatggaacagtttcatcccaaaaccattccccctaactcctcccccattttttcatggaaaaattgtcttccatgaaacgggttcctggtgccaggaaggttgggtaccactattgtagataatttccttccaaattactggcatctgggttaattctggcagtattgtcagtacaacatggacgaggacttgataaagtgatttctttccacccacccaatatcttgttcttctccaggcagtcagttgtgggaaacttatcaggtttgagggagttacttgctttcatcaggtcaccttgtcccctacctcagggagccccacagctctgagtgctttggctgtgggagaattccatcctctgggtgtgcaagtgggtgtgtatgggtggaggaatctgaccaaataaggctttaccttagctagaaaatcaccctggcttcaggaaacccaccagtgcatgccagctttgcagttcttttgttgttgttgtttttgggacagagtctcgctctgtcacccaggctggagtgcatttgctcaatcttggcatttgcaacctccacttcccaggtacaagtgattctcgtgcctcagtctgccaagtagctggaattacaggtgcccgccaccatgcctggctaatttttgcattttttagtttgagacggggtttcaccaatgttggccaggctgatcttgaactcctgacctcaagtcatccacccgcctcagcctcccaaagtgctgggattacaggcatgaggcacagtgcccggcctcagtttctgcagttcttgctttttaacagttgtttaccctacaaaaatggaaaatatacttggaaatatttgtggacatagggcttttaagtatatgcacttagagatagatacagacaacctatggattaggaaataggacactatccatgtctgaaatttaaataaggtccaaattagcttagatccaatatgattccccaatgcatatatgaacaatacgtgaacattgttgtgtgcacaactatggaaaggtcttaatccgcacagtgactctgagataagactcactgaaggaaatacagcagcaaacccaggagatgtgagttccaatcttcatttgtaactcactccaaatgagatcctagcaatgaagtaatttttttttgtttcccactaaaaacaaataaacaaaaaccttagtttttctatgctacagaattaggatgacaaatgaacttatcttgcagtcactataagaacactgacagtttcagagatagtattaaaaatcaactaaacacttataattattgtgaaagcatttatctatcaaagaaggttagcctgcagccagttggaaagttttttttgttgtttttttggtttgtttgtttgtttgtttgtttgtttgtttgatagagacagggtctcactatgttgccaggctctcctgggctcaagcaatcctcccgcctcagcctcccaaaatgctgggattacaggcatgagccaccgtgtccggctgccaggtggaaagaacaatttaaggagatggttaaaagtggaaaagccaataacatggtaataattgaaataaaagaagaaagaaaaaattgaactctgatacaaagagactacaactgtgtaataggttgcataaaaagaaattttgcaaacatgtaataggttgcaaggcagataaaaacaaaaatcatgagaagccactcctgccaaattcattcatagtcaaaatacaagttaacttttgtgggagattaaaaaaaagaaaactaagagcattttaaaatgaagtaggattaggtatgctagcaagagagtttttttcaaaaggctgtggcaccccacgtaccccaaagaaggggagccagcagtaaacaatgtggccttatgtggaatacatggcaatgggctccaaatacagattcaggctgggcgcggtggctcacatgtgtaatcctggcactttgggaggccaaggcaagtggatcacctgaggtcaggagttcaacaccagcctggccaacatggtgaaatcccgtctctactaaaaatacaaaaaactagccaggcatggtggcaggcacctgtaatctcaactacttgggaggctgaagcaggagaattgcttgaacctgggaggcagaggttgtagtgagctgaaattgcaccactggactccagcctgggcaatagagtgagactctgtctcaaaaaaaatagagattgagagaagctggaggccaaacagtagagaactgaagcatcccttggtgggacagctgtggcttttttcataatatgaaaaataattatttccattattttttaaatttgtttttttttattatattttattttattgtatattttttgagaacagggtcttgctccgttgcccggctggagtgcagtggcaccatctcagctcattgcaacctccgccttcaggtcttcagtgatcctcccacctcagcctcccaggtagctgggattacaggtgcgcatcaccatgcctggctaactttgtatttttgtagagacagggtttcaccgtgtcgctcaggctagtctcgaacacctgagctcaagcgatccacctgacttggcctcccacagtggtagtattacaggcataagccaccgcgcctggctgaaaaataattatttttctaccagcaaaagaagaaaggaacccatcagttccaaggcaactgaagtgaccacttgcaatgcaaaggtgttggctcattcaaagtcaaagatgttggctggatcagcgcctctgtgtatccccacagtgtctgtggccattttcttcagggctcatgtggtgtgctgcaacagggtcaggggacaagtgcactctggtctgccgtgcaggtgcagcagggagacccgcccagggtcactgtagctctggagtggagcaaaggccaaagctcagggttcacctcctcaatctgctgttgtagctaacactgtgccactgtaaactctctcctgtgcgtccaagtccaccaaggtaaggtctgttgtggatttagctgctctgagtctctgctaaaaagagcagctgatgaattgactctttctttctactttcagcatcttcactgcatgtttcaaatcgtgagagcctgataggctgacttttgtttagggaatgtgccttttgttgttgttattaacacagtcgttctctgttgcccaggttggggtgcagtggcatgatctccactcactgcaacctccatctcccgggttcaagtgattctcctgcctcagccacccaagtagctgggattacaggcacccaccaccgcaaccgactaatttttgcgttattagtagagatggggtttcactctgttggccaggctagtcttgaactcctgacctcaggtgatccacctgcctcagcctcccaaagcgctgggattacaagcatgagccactacacccagccttttaaaatttttaatctaccgtttacacagtgttcttgtacctttttaaaaagtgatagagcttataataatgggtgaagatgactgctacaggagtaacttttaaaaggactatcttgtgatttggaacacacagaaaatgaaggggaaaggtaaacatctggctttcacaggtatgaactcagaaaatcaagtcaattcatgtcctcaccttagaagcagtggaagcaaagggacgtttagagcacttttttagaggcggataatatgacgggatcaaaatggaatgataaatggaaaaaagacaaaagaacagtctattccagaataatactttgttgtggaggaagtgatcctcccaaacagcacaggtggttactatgtttataagggacatgtgttcatatttagtgcattttttcttctgcatttttttttttcagacaggatctcactctgtcgcccagagtggagtgcagcagcatgattacagctcactgcagcctcgaactcctgggctaaagtcatcctctcacctcagcctcccaagtagctaggattacaggcatgcttcaccacaccacgctaaatctttgtttgtttgttttttcatcaacttttattttaagttctggggtacatgtgcaggatgtgcaggtttgttacacaggtaaacgtttgccatggtggtttgctgcacagatcaactcatcaccttggtataagccaagcatccattagccattcttcctcccccgcctccccatttccccgacagacccgagggcatgttgttcgccccatgtgtccatgcgttctcatcattccattcccactggccaggttgccgagaaaaataaatgcttttacattgttggtgggaacgtaaattacttcaaccattgtggaagacagtgtggcgattcctcaaagatctagaaacagaaataccatttgacccatcattcctgttactgggtatatacccccaagaaatagaaattattgtattataaagatacatgaacatgtataccttttttttttttttaagagatagggcctcgctatgttgtccaggctggtctcaaacacctgacctcaagcagtcatcctgccctggcctcccaaagtgttgagatgacaggcatgatccactgagcccagtcttcctctacaacttctaacttagtaccgtgtcctatagtaagatagtgtacattatgattatatatttgtatttatatattgctgacccaaacagaagtttcagaaaaaaagcttagcctttctctgcaatgcattctgatagttaacattttttgtaccattaaaaaaatccaacactttgggaggctgaggcgggcggatcacctgaggtcaggagtttgagaccagcctggccaacatggcaaaaccccatctctactaaaaacacaaaaattagccaggcatggtgggtgcctgtaatcccagctactctggaggctgaggcaggagaatcacttgaacccaggaagcggaggttgcagtgagctgaaatcgtgccactgcactccagcctgggcaaaacagtgagactccatctcaaataataataataataatgctgtttgcaaccccatactaaatttccttgacaccacaatatgaaaagcactgttttaaaataaactgaaattggatttttatttttatttttgagacaagatctcactctcacccagactggagtgcagtggtgtgatcacagctcaccgacaccttgatctcctggcctcaagtgaccctcctgcctcagcctcccaaagtgctgggcaccatgctcagtttagaatgggaattttgaggatatagccaggctgtctcaaacagagggtaagaggaaagatagctgaacttggaattaggaaactgagaccaagtccaggctctgatgtttgttaaaggtgaaaatgagcacaaatcttactacctttagtcctccatttccccatctatccagtgacaaccataccacctccatgtgcctcacagaatgctccaagaaaaattaaatcattttcaaaatgtaaaaattattttaaaagattgcataagtaattcaattatcatagtcctagtcgtaaatggtaaaacacttggagatctgaggacctttctgtcctgtaaggcatgcagctaggaagtgagatgcactcacgaaaaccaggcagcacttgaatttattctcagtggtgaggcgtgactcatgcccttccttctataagattgtcttccctaactcctggattcttgcctgttcctgacacttctctcttttcacccttacccttcttcaagtagactgtagtggtttgtttattcaattcattcagcatcttccttgagtgctatgtattaggtgctatgctaggcacttaagacaatgtggtggaccaggcaatacgccctgccctcctgggcttgtactttagtagggcatgtcttattataggtttttttctgcttgaccatcccaactaaatcgatttggacagctgtattagaaacctaaagaaataaaaagatagataatccagcaggcttttagcagcctgtggatcactgtggcatagtcctaggtctcagatgcacagagaagatgatgacctggatttagagaacaaatccgtggtcagcaaaggtggagaggaggctctggatatagagccagcagatgctaccccagcaagaccactcttcagaagatgaccaagcctcagtgatcacctgtccaggacagccatttctataagatcattaacaacgaagacagaaagcaccagcaaacccagcagcattccaggaagaagagaaagccctgttttctggactaagggagtaggttaacagtcactgtaatttgcctttggcaaaattttcacattgtcagcattgctcactgatgctgtaatcctagtttcaaaatctgatcgctcttgtctctccactgcttaatcaagggctttgttgacataaacagtgtttaccctattgaacttaagagaggaattatgcagctgtcggggtcaccttgggaaagggtagggtgagtggcaagccgcaatgatgtgacctagtaggtccttcctacctccccaacccctagtaaagctccccacccactggatacctggaattccacccaggtaagacttgctattccggaatgagaatgcttttccttctctctcgtctgctttcaaactgcaattgaccctaaaagctctatatatgtaaccataatctttagtgtgaatgtgtttataaatacacgttttttccctcactgtggttgtcattaggttaataccagtagctgagggggcctccagaatgagggagagtggagtgggtgaaagattcctgatgggagtagggagacctggattcagatcttgatcatgtggtttgaagccagtgtttgggcatcttggatcttccatatgctcctctgggaatgtggggaaatgatatctgtcttacagttattatgtagatttaaggagatagtatgcagaaaagcatcatacaacaaattagtttccttcctataaatgtatctcagagaacttagccacatgcaggaccatcaaaaatctataaacattacaataaggcaaagcttgagctaaaatgtggaggaattagtgaattttcctgtgcacatgataattcacatgagatagcaagatgttttcaaatatagctgccatacaatgattgttttttgttttttgtttcttctgtgcagtgacaaatgagatcctctattgggctttatgtctaaagcttgcatttcaagcaatttcctcactcgaggtcaggagttcaagaccagcctggccaacatggtgaaaccccatctctactaaaaatacaaaattatccagtcatggtggcaggcacctgtaatcccagctacttgggaggctgaggcaggagaatggcttgagcccgggaggcacaggttgcaatgggctgagatcatgccactgcacttcagcctggacaacagagcgaccctccatctcaaaaaaaaaaaaaaaatcaggttttcatcgcatcaaggatgctaaaaagaataagcatcacttaattttctctttgtttccatttgatcagccatggattgttacagaacttcactaagcagttcctggatttaccccactgtgatcctctgcttatttggttttttctccatgatgagaccctcagaaccattccttatcccatatttatctggaccagataaaaacctgaccagtgcagaggtaagttaacatacatacatatcttaatgtggttttttaaattttatgggacttgaacaaggatacagggcttccctcaacttgatataagatgaacacattaaactcagtgagcctgattttcataatatgtgtcccatatagaacttttcaaactatttcctcttcttacttgcaaaaaattgcagccaaaacatattacatgtgttaacaaatttttaacttgcatagagtcctaacatttgtgttaatgataggagactttcaggtctccgttgattctattatactaatcctaaaatagcatcactggcaggcacaggatctagatctaaataaactctcaggctgctgagggataagcaggatctcataaaaaattgtggtatttctttatgacactgtttgccagcaggtgagccattaacagctttatctcccagcccttgcctccttctctggaatgccagtttctcttacttaaaagagcaacgcctttctttttctttctttctttctttttttttttttttaattgtttttgtttgagatggagtctcactctgttgtgcaggctagagtgcaacggggtgattttggctcactgcaacctccgcctcccaggttcaaacaattgtcctacctcagcatcccgagtagctgggactacgggcatgagccaccatgctcggctaatttttgtatttttagtagagacagggtttccccatgttggccaggctggtctcgaacttctggcctcaagagatccacccgcctcggcctcccaaaatgctgggattacaggcgtgagccaccgccaccggcctcgcatttctttataagaagtacaacaagaaaatgcactgacctaactgcaaaattaccctgggctgattttacaatctccagccttagccttgaaaacactgtgtaaagtgtgtggcttcgcctgcaaggctgatgggtgcctcgggtggtgaggtggcaaagacagaaaggcaagcttcttctgtagcatcagatcacttagggacaaccctgtttccgagttgctcaggttgaagcatgccacaattaagacaacaaaggacagatgcagggtcagaagcaactcaatgaatccactgggttctgcttctcgagccactgtggaccagttaacagaccttccctccaaggagcagctcagttgtgtggtctttgctctgtggcctcctgctttctccagcaacctcagtgatccaggtgtcaaggtgggtacgttcagtgatttgagaggctgcggcactcacccatccctacagatcagcaactccagtccttccaactgtgaaaattgagatcccatgcatttctgactaaatctgtgagatgatccatattaaattgagccataaacaaatcagcagaattgttagggggagcagggggaaggttgggaacctagcaaatttgcccatgaaggaaaatgagatacattatttgcttccactctataatgtggcaaagttatttactctttccctattttcccatatctttccagatgttggaagggctgaaatatttgatgtagtgatagatcacatgaaaataaaggctgttggattctttttgttgttgttgttcagatggagtcttgctctgttgcccaggctggagtacagtggcacagtctcggctctctgcaacctctgcctcctgggttcaagcgattctcctgcctcagcctcccaagtagctgggattacaggtgtctgccaccattcatggctaatttttgtgtttttagttgtagacggggtttcatcatgttggccaggctggtctcgaactcctgacctcgtgatctgcctgcctcggcctcccaaggtgctgggattacaggtgtgagccaccatgcctggcctggattcttttaacattgtggtctacttgtctaatgttaatattcaaacaagaaggaaattatattttttaagaatcttgggccgggcacggtggctcacgcctataatcccagcactttgggaggccgaggtgggcggatcacctaagttcaggagttcaagatcaacctgatcaacatggtgaaaccccgtctcttctaaaatacaaaaattagccaggcatgatggcgggtgcctgtaatcccagctactcaggaggctgagatgggagaatggcttgaacctgggagatggtggttgcagtcagcgaagatcgggccactgcactccagcctgggcagctgagcaagactccacctcaaaaaaaaagaatcggaaaatcttagaagtgtccaaaaactttttaactcatctactcaactgtacatactatctaaacttaatacataattcagattgcacaataagccaatatatttttctgccggggtttatctaagtgtgtacattggtttttaccaatgggaaaggagactatcttttcttgtgatttccttgaaaatcagttttctcattatgtttctccgtaatgcgaataatttccaattggaggcagaatttgagatacaaaccacaggtaccttagtaaagtaccggtgcttcgtggtcatgcaatttaccaactttgcagataacaaatgagatcttccccgtttggacatactcctacctggtgctgctgctgcctgtgtttgtcctcaccgattatgtccgctacaagccagtcatcatcttgcaaggtatcagtttcatcattacctggctgctgctgttgtttggccaaggagtgaagaccatgcaggttgtagagttcttctatgggatggtcaccgccgccgaggtggcctactacgcctacatatacagcgtggtcagccccgagcactaccagagagtgagcggctactgcaggagcgtcacgctggccgcctacacagcagggtcggtgctggctcaactcttggtatccctggcgaacatgtcgtacttttacctcaacgtcatatccttggcctctgtctccgtggctttccttttctcacttttcctaccaatgcccaagaaaagcatgttttttcatgcaaaacccagcagagaaataaagaagtcatcaagcgtgaatccagtattagaggaaactcacgaaggtgaagcaccaggctgtgaagagcagaaacccacatcagaaatactcagcacttcagggaagctgaataagggccagctgaacagcctgaaaccaagcaatgtgactgtggacgtttttgtgcagtggttccaagatttgaaggagtgctactcctcaaaacgtcttttctactggtctctatggtgggctttcgccacagcaggttttaaccaggttttgaactatgttcaaatcctgtgggattacaaggcgccatcccaagattcttccatctataatggggccgtagaagctattgcaacctttggaggtaagcaaatgtcacttaatcttcctttgttggctttacccgcttaagtccattcctccaggtaccgaacttcatggcagcgaattagctctgttcagaaggaagcataacttttttcagtcaagaatgaaagtcacggccgggcatggtggcttatgcctgtaatcccagcactttgggaagctgagacgcgtggatcacgatttcaggaggtcgagaccatcctggctaatgcagtgaaaccccgtctctactaaaaatacaaaaaataaaataggtaggcgtggtggcgggcacctgtagtcccagcactttgggaggccgaggctggcgaatcacgaggacaggagatggagaccatcctggctaacacggtgaaaccccatctctactaaaaatacaaagaaattagccggtcatggtggcggatgcctgtagtcccagctacttgggaggctgaggcaggagaatggcatgaacctgggaggctgagcttgcagtgagcctagatcgtgccactgcactccagcctggatgacagagcgagactcctctcaaaaaaataaaaataaaaataaaaagaatgaaagtcactggaaaaataagaatactgtgactttctattgtgttgtagttacaagtaacttttttattttttgagacagagcctcactctgtcaccaagctggaatgcagtggtgcgatctcagctcactgcaacctctgcctcccaggttcaagctattctcctgcctcagcctcctgagtagctgggactacaggcacgtgccaccatgcccagctaaatttttttgtatttttagtagagacggggtttcaccatgttgcccaggatggtctcaatctcttgacctcatgatctacccgcctcagcctccaaaagtgctgggattacaggcgtgagccaccacgcccagccacaagaagtaactcttaggagctcagggattagcaccaaacaatgaaattctagttgaatccctaagattccaattcatcattagcacaaaggttaataacatgccctgttcttttaggattatttttaatatcaaaatatatacatatatgtgtatatgttttcattattttagaaaataaattaaggattccaaattctcactgagggttttgttaatacaggatttgaactagctagcatgcacctataacaattctaggctatacaccaacaactttcaaaagcagctttctcatggtatttaaatgagggctggaagagatgtgaaagtcaggattttaatatcagagggaaatctgtctttgaagtttaatctacaataaatgtttatttcctagtaactggaagcttaaatgtcaaatgagactttgaagatattttttaggaagtgagaattcgccccaccctcatttacaaaaagttttagaaaacccgtgtgacctctattttattattatctcccttttgggaagcttcagtttaactcctggaaaccaggactgtgccagaattgcttcactgaaattattgctcctacattccaaatccatggggggaaaaatagttattttttttttcctctgtggtcatgatcacatgtgggaaagttagtcatatgtcaatgtagtaatttgaaatctaaataccttttgtttatttatttattttagacagagtcttactctgtcacccaggctggattgcagtggcatgatttcagctcattgcaaactctgcctccagggttcaagtgattctcctgcctcagcctcctgagtagctgggattgcaggtgcccgccaccatgctggctaatttttgtatttttagtagagctggagtttcaccatgttggccaggctggtctctaactcctgacctcaagtgatccacccccttcagcctcccaaagtgctgggattacaggagtgcgccactgtccccagccctaaataccttttacctttgttaaagagaaccacacaaaagtgctaaccctaattactgtcaattatttcaatttcttgaactctgtaagtctatatagatattttcacccaaagcttctcaagtaaattatgtcagatgttgaagactttagagtggagattggaaataagactaagattactaaaggttcataataaagactaaaactgggtagggcaagaaaaaagactaaaactttcaatgtaacacatctgatactcatcactgaaaaagacttacagcaaaaactgagaaaagaaaggcaaatagagaggccagtgtattcccagagaatttatttcatccttttccatccctgcatgttgtactgagtgactaggttaatgtatcatttctccttacactgctgtggttaggaacctttctggcccctctgcagaatacagtgtctggcgtgtagttgatgctaattaaaagtatggtgactaagtgaccgaaagaatagcaagtgaaaagaaaagccaaaagaagacacgcttgagaaaaggatagatccacattcaggtcgatcacacaattttgtgaaagcaatatatttatctttcagaattacccgagacctgggtttttaagagagggtgttgatattttcctgcatgcaaagtcattatgtttgattgccttcaatgttttttttcaggggctgtggctgcctttgcagtgggttatgtgaaagtcaactgggaccttctgggagagctggctctggtggtcttctcagttgtcaatgccggttctttatttctcatgcattacacagccaatatctgggcgtgctatgctggctatttgatattcaagtccagctatatgcttcttataaccatagcagtgtaagttttaccaaccactcctaaaactgaactgtattcctctctcttctgtctttctaaactttctctaagaacttcagaaggattttagtcaattgcaatattaaatgttgactgctttatattaaattagacacaactaagccaacttttcatttaactatttgctctctgaatattgctacaatataccttaagtcatcaagggaaaaaactctgtaggtttatagaccaaaagcagtgatacattgtcaggtttttctttttgttttattttgtttgagagatggcctggctctcttgcccaggctggagagcagtggtgcgatcacgatcaggactcaatgcagccttgacttcccaggctcaggtgagtccccaacctcaacctcctgagtagctgggatgacaagcatgtgccaccatgcctagctaatttttcgtattttgtagagatggggtttcaccatgttgctcaggctggtcccaaactcctgggctcaagcgatccacctgccctggcttcccaaagtgctggaattacaggtgtgagccactacatctggcatcattgtcaggatttgatttgtttatttccagcaactttctacataaagtgtgatgtgatctgctttcaaatggttaggtttagatttcattcctactttcatttgtttgcttgagaaattctaagcacatacttttatgacacaaaagattctcaggaaagttattaaaaagttggatactaaaaaaagtagatgcaaagataacaagaaacctttagctgcagtcgtgtatggaaccaagcagtttttcttttcttttgttctttttgagacagggtctcacccaggcaggagtgcagtggtgcaatcatagcacaccacaatcttgatctcctgggctcaagcagtcctcccacctcagcctcctgagtagctgaaactactggtgcacaccaccatgcctggctaaatttttaattttcatttttgtagagacagagtgtcactgtgttccccaggctggtctcaaactcctgggctcaagtaatcctctggcctcagcttcccaaagtggtaggattacaggtgtgagccaccacgccagatctagttttcagtcattttctaaaaataatttctgggatttagaatttcccgtcatttttgcttctacttttttctcagagatctctttaagaaaatgattaaaaaaccattcggtttcatataaaagtacagctaaagctgactacagaaaatatgctttgctattaaccaaaaaaaatgagaaacatttgaatttcaaattgcatgaaagaagtggagacaaaagcttcatcaagttttgctttcaatttgtgaagaatgttttataaacaatttacaacacagaaatatgagcactctgggaaaaaatcatcaaaggaaaaaacaattagttggtatgtttattttcttcatggaaatgtcttaatttaatcagaatcatgtatcttaggttgcttttttttaaatgtgaagattttgttaaagtaggattatatcatttctttgcattaaaaaaaaatattcacggctgggcacagtggctcccgcctgtaatcccagcactttgggaggccaaagcaggtggatcacctgaggtcaggagttcgagaccagcctggccaatatgattaaaccccgtatctactaaaaatacaaaaattagctgggcatggtggtgagaacctgtaatccctgctactggggaggctgaggcaggagaatcccttgaacctgggaggcagaggttgcacattctcatcagcatttattgcttgttttttggataaaagccattcaaattgaagtgagataatatctcattgtagttttgatttataattctcttatcaatgatgttgagcaccttttcatatacctgtttgccattcgcatgcctttaaagaaacatctgttcagatttttgcccatttttaatctgattattagactttttttccctgtagagttgtttgaactccttatatattctggtttttaatcccttgtcacatgggtagtttgcaaatttgtttttccattctgtgggtggcctctttccttggctgtgcaggagctttttaacttgatgtgatcccgtttgtccatttttgctttggttgcctgtgtttgtggggtactcaagaaatctttgcccactccaacgtcccagagagtttccccaatgttttcttgtagttgtttcataatttgaggtcttagatttaagtcattaatccattttgacttgattttgtatatagtgagagataggggtctactttcattcattcttctgcatacggatattcagttttcccagcaccatttgttgaagagactgtcttttccccaatgtatgttcctggcatctttggtgaaaatgagtttactgtaggtgtgtgggttcactattgggtttctgggttcactcttctgttccattggtctacatgtctgcttttatgccagaactatgctgttttggttactatagctctatagtgtaattcaaagtcaggcaatgtgattcctccagttttttgttgttgttgttgttgttgtttcattttgttttgttttgcttaggatagctttgactattctgggtcttctgtggtttcatataaattttagaattgctttttctatttctgtgaagaatatccttggcattttaatagggattgcattgaatctgtaaattgctttggatagtatgggcattttaacaatattgattcctccagtccatgaatatggaatatcattccattttgtgtgtgtgtgtcctcttcaatttcttgtatcagtgttttatagttttcattgcaaagatctttcacttctttagttaattcttaggtattttatctgtagctattgtaaataggattactttcttgatttcttttccagattgttctgtttgcatatagaaatgttatggagttttgtatgttgattttatgtcctgcaaatatactgaacttatttatcagttctaatagtttattggtaagagtctttaagttttcctaaatgtaagatcatatcgtctgcaagcaaggataatttgacttgatcctttccaatgtggatgccctttatttctttctcttgtctgattgctctagagaagacttccagtgctatgttgaatagcagtggtaaaagtaggcatccttgtcgtgttccaaatcttagagagtaaagcatttcagctttttcccattcaatctggtactagctgtaggtctgtcatatatggcttttattatgttgactatgttccttctatacccagttttttgagggtatttagccagaaggaatgttgaattgtatcacatactttgtttagcatcaattgaatgatcatagtttttgtccttcattctgtcgatgtgatttatcacactgattgatttacatatgttaaatgatccttgcatccctgggataaatcccacttagtcatgatagattatctttctaatgtattattgaattcagtttgctagtattttgttgagaatttttgcatcaatattcatcagagattggcctgtagttgttttttgtttttaatgtgtctggtttggtgttagggtaacactggccttgtagaatgagtttggaagtattccctcctctgttttttagaatagtttggttaggattggaattagttctttgatagaattcagcagtgaagccattgggtcctgggcttttctttagtgggaggctttttattatgacttcaatcttattacttattattggtcttctcaggttttggatttcttcatggttcaatcggataggttgtttgtatataggaatttatccatttcttctagattttccaatttattggcatatacttgctcatagtagccactgatgatcctttaaatttctgcagtattggttgtaatgtttccttttacatctctagttttatttacttgggacttctctctttttcttagtctggctaaaggtttgtcagttttatcttttctaaaacccaactttttgttcattgacattttgtattgttttcttcatttcaatttcatttctttctgatctgatatttattatttcctttcttctactaattttgggttaagtttactcttacttttctagttctttatgacgcatcattaagttatttatttcagatgactttttttttcttcttttctttaagagacagggtcttactatgttctccaggctgaactgcactggcgtgataatctctactcactgcaacttctgcctcctgggctcaagtgatcctcctgcctcagactcctgagaagctgggatcacaaacatgcaccaccacacctggctaatttttgtgtatttttggtagagacagggtttcaccatactgcccaggctggtctagaactctggagctcaagtgattcatctgcctcagcctcgcagagtgctggaattatacacatgggccaccacacccggcctctcttcttttttttatgtaggcacttgtaactataaacttccctcttaatactgctttcactgtgtcctataggttttggcatgttgtgtttccattatcatttatttcaagaaatttttcagtttctctcaatttcttcattgacccactggtcattcaggggcatattgtttaatttccatgtgtttctatggtttccaaaattcctcttgttgttgatttctagttttattctattgtggtcagagacgatgtttgatattaattatttcaaatttttgaatatgttttaagagttgttttgtaacctaacatggtttatccttgacaatgatccatatgctgagaacaatgtgtattctgtggccattggatgaaaagttctgtaaatatctattaggtccattttttctatagtgcagattaagtctgatgtttctttattgattttctctctggaagatctgtccagtgctgaaagtggggttttaaagtctccaactattactgtattggattctcttatctccttctagctctaatacttgctttatatatgggtgctccatacgttaaaaaaaatttacaatttttttttttttttttttttttttttgagatggagtctcggtctgtcacccaggctggagtgcagtggcacgatctcagctcactgcaagctccacctcccgggttcacaccattctcctgcctcagcctcccgagtagctgggactacaggcgcctgccatcatgcccagctaattttttgtatttttagtagagacggggtttcatcgtgttagccaggatggccttgatctcctgacctcatgatctgcccacctcggcctcccaaagtgctgggattacaggcatgagccaccgcgcctggccgtatttacaatttttatattctcttgctgaattgacccttttatcattgtttaatgacctgtgtctcttacagtttctgtcttgaaatgtattttctctgctatatgtatagctacaagtcctctttttttgtttgtttccattggcatggcatatctttgtccatcccttcattttcagtctatgtatgtctctataggtaaaatgtctttcttgtaggcaacaggtcattgggtctttttaaaaatccattcaaccactctcttttgaagagtttagattgataagtaaggacttactcctgttattttgttatttcttttctggttttgcagtgtttttccttttctttcttccttttagtgaaggtgattttctctggtgatataatttaatttcttttttactttttgggtatccattgcatgtttttcaatttgagattaccatgaggcttgcaatactatcttataacccattattttaagctgataacaacttaagactatttgcataaacaaacaagcaaaaagaaaactaataaaaactctacagtgtagctttgtcctcctgctttttaactttttgttgtttctctttatatcttattgtactatttgtcttgaaaatttgtagttactatttttgattggttcatcttttagtctttctacttatgagagtagtttacataccccagttacagtgtgataatattctgtgttgttctatgtacctattattacaagtgagttttgtgcctttacatgttttcttattgcgcatgaacgtccttttcttagagatggaagtactcccttcagcatttcttgtaggacaggtctggtgttgatgaaatccctcagcttctatttgtctgggatggtctttatttctccttcgggtttgatattttcactggatatactattctagggtaaaagtttttctccttcagcactttaaatatgtcatgccactccctggttctaaaatttctactgaaaagactgctgccagacattggagctctcttgtatgttatttatttcctttctcttgctccttttagaatcctttctttatccttaacctttgggagtttgattattaaatacctctaagtagtcttctttgggttaaatctgcttggtgttctgtaaccttgtccttggatattgatctctttaggtttgggaagctctctgatattatccctttgaataaactttctacctctatctatttctttacctcctctttaaggccaataacttagattttcctttttgaggctgttttctaggtattgtaggtgtgcctcattcttcttttttctgttgtctcctgactgtatttttaaatagcttgtcttcaagcttgctaattatttcttctgcttgatcagttctgctggtatgagattctgatgcattctcagtatgtcaattgcatttttcaaccacagcatttctgcttgattctttttaattatttcaatctctttattaaatttatctgacagaattctgaattccttctttgtgttatcttgaatttctttgcgttttcttaacacagctattttgaattctgtgtctaaaaggtcgtatatgtttctccaggattggtccctggtgccttatttagtttgtttggtgagaacgttttcctggatgatcttgatgcttatggatgttcatcagtgtcagggtattgaagagttgtatttattgtagtctttgctgtctgggcttttttgtacctgtcctccgtgggaaggctttccaggtattcagaaggatttgggtgttgtgatctaaactgtatctacattagggagcaccccaagcccagtaacactgtggttctagcagactcttagagctactgctttggtggtcttggataagatccagaagaattctctggattaccagacagagacacttgttcttttcctttactttcttccagacagtctctctctctctttgctggactacctggagctggaggtgggtgacacaaatacccctgtggccaatatgttctatctttttaagacttccatccatgtatattatagttaaaatgcttatttatgtttaatgatagatttcagattgcagttaatctgaatgtggaacgctatgccttggtatttggaatcaacacctttattgccttggtgattcagaccatcatgactgtgattgtagtagatcagagagggctcaacttgccagtcagcattcaggtaagctgcaatacttctgttttcaactaggtaacctcaaaaatttctcaaccttacaacaagcaatatttaaatttcttgagttccttggttaagcaattaaaaaatacataattccttcattatcatattataacacaccaagtaggttttgagcaataattgcaactaggacaacatttacatggataaggcaggtaagaagtaacctcaatgcttaaatttattcttggagacattgaatgtagcattgcaccagcctccaaacaaagacatagagacaggtcaatgagttttagtgtttttttgggtttgttttgttttgttttttactattgatgatagtaactatgattttaacccaagcaacctgctctaaagccaagactcttagtcaccgtattgcttacaccttcttacttgatcttgatttcttacttgataggagagtattgttcaacctaaatgacccatattaaaaacctgggtctcagttaccccataatccaagcaaaccaacagtattaggatgtattatcattgacatagatggtcatattttatatgtggctaattatttgtttttctccagtttttagtttatgggagctattttgcagtaattgctggaattttcctaatgagaagcatgtatattacctactcaaccaaatcccagaaggatgtacagagccctgctccaagtgagaatccagatgtgtctcacccagaggaagagagtaatatcatcatgtcaacaaaactctaacctcatcgcaacaaacgcaacagtggctttcaaagttatgcaataataaggaaagattttgagatgggtggcatatgttttgccataacttgacatgctttgcaaatctggattccaatggacctttcaaaaccacaacaaaacctcagttttagatgagttctctatgtgaccaattttactggatgcaattgacaggacccgtcatcataattaaacaacccatattggggaccccctgtgactagtagcagctggaaaattctggtttttatcacttgtaaagacatgcagatggcgtggaaccaaaccatgagaaaactccagccatcctggagttgatattcaccatttgtgaggagaaatactaactggactgaccctattgctaggcttaaatacttatttgatcttaccaaagaagtcaacacatgggacctttgtgtcacatgaaccattttctttcctcttctattaagtgtatttctgtttaagttacagttctctaagagaattacaatgtttgtcccatttctaagggcttctcttcaactctaataacagcattattcacgttatgatttgatagtattattatttaatttttttatgattattttccattttgtgctctgagttttgctgttgaaagtctccctcaagaatagcttcagatcctcttgtgtatttgcagaatacacaaggtcatttcccagtggcctgggagaggcagtgagccttctctccaccaccatagacaggtgttaatgcatctatgggccaggtgcagtggctcactcctgtaatccgagcaatttgggaggccaaggtgggagttttgcttgaggccagaggttcaagaccagcctgggcaacacagtgacacctgactctactaaaaaattaaaaaattagctgggcagcgtggtgtgtgcctgtagtctcagctacttgggaggccatggtgggaggatgggttgagcacaggagtcagaggctacagtgagctatgattgcaccattgcactccagcctgggcaacagagtaagactctcatccccctcctcccaaaaaagagcacctgtgtggtgtctgtctaaaataggaaaacttaaaggaggtttctagaagtattagaaataagaaaacactgatggggggagtggaataaaacacctgattttgttttgttttggtttttgagacagtctcgctctctcacccaggctggaatgcaatggcgtgatcttggctcactgcaaacttcacctcctgagttcaagccattctcctacctcagcctcccaagtagctgggactatgggtgcacaccaccacgcctggctaatttttgtatttttagtggagatggggtttcacaatgttggccaggctggtctcaaactcctgacttcaggtgatctgtctgcctcggcctcccaaagagctgagattacaggcgtgagccaccatgcctggccaaaacacctgatttttaaatggtagcaattgtgctaaataaaatgtgtaaaaattttaaagagttgttaacattttttgatgaattctgctgaaaattatctgaacatacctgtttttcgaaacttcaagaaacttcaataagggatgcattgagcagtctgacagtgagaataaagaatgctgagtcaagatttatattaaggctggaagctgtggctcacacctgtaatcccagcattttgggaggctgaagtgagaggttaatttgagggtaggggtatgagaccatcttggccaatatagcaagaccctgtgtctaaaacaaacaaaaaaatttttaattggattttgatatggtttggatctgtgtccccaccaaatctcacgttgaagtgtaatccccaatgttagaggtggggccggctgggaggcgactggatcatgggtgtgaagccttcatgaatggtttggcaccgtcccctcagtgctggtctcatgacagtgagttatcgtgagatctggtagtttaaaagtgtgtagcacctccccactctctctttctcctgctttggccacgtgaagatgcctgctcccactttgccttctgccatgagtaaaaattccccgaggactccctagaagcagatgttgccacgcttcctatatagcctgtgagctaattaaaccccttttcttacaaacta

SEQ ID NO: 334 - DNA, 1952 bp, Homo sapiens
tctgtgtctcagctcacagggcttccaggatcatggcctataaaatgcttcaagtagtcctgtgctcaacattgcttatcggagcattgggagcgccatttttgttggaagaccctgcaaaccagttcctacgtctcaaaagacatgtaaatttgcaggattactgggacccagatcacagttcagatgtgtgggtaaacacactggctaagcaggtatttgtattagaaacaaatggtccttcaccatttatctttttaaatagtcattgcattagctgaccactaattaacacatgactagcctagccctgatttttcctctctagacactctgaactatatctgctttttcttgcccatgaagtggtttttgcctggtaaactctgcctcttgcttaaagactagactcaaatgtccctctgaagcctttcccttcttctcagggcgacatttgtctttccttctctccctttttgcatgctctttcacaaataaatagctctcaaaatgtcaattggaattacttgttttgtgtacccaacctacctacctagactataaaggtagggtctgtatcttatccttcaaggtaattattctcgggaactagcaaaatgattgttatatagtcaaagcttaataaattattacatgtatgtgtagattgatgaatggatagtggtcggactttagttcactttcagttgttcagtagctaaatatccccggtgacaattattcaaggctttaatgttgttcctccttttgcttgccttttgtacattttcctattcatttgcattctcgctgcaaaagaaacaaagaagaaatttgcattggccttttttattctatatttacttttctgatagaagaagacattaaaactccaggccaaatgaaattgctgaattatctgagtatttcaattattcatgatctccctcttacaatttagcaatttaggaaacaaagttgtataatgaatgaatgaattctttcacttattctttctttctttccacatatctcaggatctgattatcatcaggcatgaggattgtataaagtcataaaaagttgaatgtccttgttttcatggggccttgatcttgtccgtactccacataactgggtcttaaccggtctaccaggatctgcttgttttgcacttgctgatgaaaactactaactgaataatgcatccagttttatggctgtttttgtccaataggcattatttagcattattaaaacaagacatttgtttatttggtcaattaagtgattaagtaggctggtagactgtgtcttctttatagaatgttgacattttcaggtactctcctgcctctacttgtagaccagatttgtaccaactgacaggcactatgtaatgtagcaagactctgctacattggtttatactgtggccccacaaatactgtaaaatatctgagtattgaaataaacagataattaaaagtatgaaaaccaaattctatttggtataattcttccattatatttttctcatcttttaggaatatctgtatgataatcagaataactgatgcaagatgtgttctacacactcagagatcatgacttgtgtttccttttcttgaaggctcgtgaaacatggattgctttgaaaacaacagcacagtattatttggatatgaataccttcacctttgacatgtctactgcccagtaaatatgttttcctggttaaagcaggaggatgaagatggcagaggttggaatggcattgtgccaaaaccatgggttttagagatctgagggtatatccatgctgtttactacattatttattatgtctgtctcaaagttgttgaaaacagtagttatgaaaacccatgtaggaaactggaataagacattctcaataaatggtagttctcaaaaaaaaaaaaaaaaaaaaa

SEQ ID NO: 335 - DNA, 167651 bp, Homo sapiens
gtgaagtcgaagcagtgagcaaggaggcctctccaaggagctgtttcaatccactggatgtgccaggactcaccaggaataaaaggttagtctctaagccaggcccaatggggctattaacacttagcactacttcagaccagccagtgagagtcaggatgcacagggaaggagagtgggagaccctggaagggaacttctaggtcatctggttaagtttcctccactaacaggagtgagtagcagtgttggtggtcaagtagtaagctaggaggagaaaggacataactagtcttttacagatggtttggttaaccaggactagatttctaggtgtcttaaccctgaggccaggtgaaaggtcccaggacagagggcaaccctaattggtggcacgtggtcaccattcctgagtagctttgctaattagatcacttttttttttttttttgagacagggtctccctctgtcgcccaggctggagtgcaatggcatgaccttggctcactgcaacctctgccttcaagtgattctcctgcctcagactcctgagtagctgggattataggcgcatactaccacacctgactatttttgtagttttagtagagaggaggtttcatcctattggccaggctggtcttgaactcctgacctcaagtgatccacctgcctcagcctcccaaagtgttgggattacaggtgtgagccaccgcgcccagccaaggtcactcttctaaaggcctatttcttcagtccggatgccagggagagtgagctgctgtagaagaaagcagcttattgctgatagacagagaacatctctcaatttctaccttctccccagtttccttcttcatttcatatttagagcttcctattcttcttcttcttcttttttttttttgagacagaatcttgctctgtcacccaggctggagtgcagtggcgcaatctgggctcactgcaacctccctctcccaggatcaagtgattctcctgtctcagctacccaagtagccaggactacagacgcgtgccaccatggccagctaatattagagatgaggtttcaccatgctgactaggctggtctcaaactcctgacctcaggcaatctgctggccttggcctcccaaagtgctgggattacaggtgtgagccaccacattgggccagcttcctattcttctgaattagagaaagaataaaatgggtttttcccaaatttctctctctctctgtctctctctcttttgttgttgtttttttgagacagggtcttgctctgtctcaaaaactcccaggctggagtgcagtggcatgatcatggccccctgcagcctcaacctcacaggttcaagcaatcctcccaagtagccgggagtacagatgcatgccactgcactgggctaatcttttgattttttttgtagagacaagggctcactatgttgcccagactggtcttgaactcctgggctcaagcaatcctcccaccttggcctcccaaagtgctgggattatagtcatgagccactgcatctaaaatttattatagagtgttacttttctagaccactaagggcctcactctgaactgggagggtaacttaactcttcctgacagacctgggcctccatgctactgtaacctctttgagtcctccatacctccaccctgggacttagcaaatggtctttggcctccttgagtgagcaagaggtagtgaggaagtccagtgcagtcatgaagtcatgagcctaggttgaattgtgattcagctgaatttttttttttttgagacggagtcttgctctgtcgccaggctggagtgcagtggctcaatctcggctcactgcaacttctgcttcctgggttcaagtgattctcctgcttcatcctccccagtagctgagattacaggtgtgcgccaccatgcccggctaatttttgtatttttagtagagacagggtttcaccatgttggccaggatggcctcgatctcctgaccttgtgatccacccatcttggcatcccaaagtgctaggattacaggtgtgagccactgcgcctggctgactcagctgaattttaagtattgaagtgaactatacgaaattgttgatatgcaatctaaaaacattaaaatgttttgttttgagataattgtagattgatatgtagttgtaaggaataatacagagagaccccatgtactcttttgcccattttctcctaatagtaacattgtgcaaaactataatctaatatagtaaccaataagttgatattgatacagtaaagatacatacagaacagtttcatcaccacagaacaatttcatcaccacagaatctcttctatagccacatccaccctgcccctccctggcagctacgattttgtcctccatttgtataattttaccattttaagaatgttacataaatgaaaatgtaaagtatgtaacattttgggattagcttttttcacttatggtaattccttggagattcactgagcttgttatatgtgtcaatagtttgttactttttattgctcactagtattccatggtatgcatgtaccacagcttgtttaaccattgacccattaaaagatgcctgggttgtttccagttttgggttgttacaaagtaaagctactgaacattccttttataggtttttgtgtgttttcattttttctgggataagtacacaagagtgcaactgctgggtcatatggtagttctgtgtttagttttataagaaactgctaaactcttccagggtggttgtaccagtttacattcctgccagtgatgtaggagtgattcagtttctcggctacatcctcattctgtcaggtgtgtagtgatatctcattgtggttttaatttgtatttccctaatggctaacaatgttgaatttcttttcatatgcttgttatctatgtatctgtttcagggaaatatgcgtttatgtcttttgcacattttaattttttttttttttgagacagaatcttactatattgcctacgttggagtgcaatggcgtgatcttggcttactgcaacctctacctcctggattcaaacagttctcctgcctcagcctcccaagtccctgggattacaggcatgcaccactatgcccggctaatgttgtatttttagtacagacagggtttcaccatgttggtcagcctggtcttgaactcctgacctcaggtgatccacctgccttggcctcccaaagtactgagattacaggtgtgagccactgcacccgccagtttgtttgttttttaatgctgagttttgagaattctttacatattctaaatactcctttgttggctatgtggtttcaagtattttgcccagttggtagtatgtcttttcatcttcttaacagggtctttcacagagcaaaaataatcttgataaggtccaacatatcaatttttcctcttattgtgcttttggtaacaagccacagaactctttgtatagctctgggtactagaaaattttctcctatttctttctaagttttatagttttacatttaagtctagaatccattttgacttgatttttgtataaggtatgaagtttgggtcctggattttctctcttttttttttttcctatggatgtccaattgctccaacatcatttgttgaaaaagcacatttcttccactgaattgcttttgatcctttgtcaaaaattagttggacagatttacgtgggtccattctatttctgggtctttattctgttccgttgatatgtgtctatttttctgccaacactgcacggtttttgaaattgtacctttacagtaggcttcaagtttgggtggagtgattcctcccattttattttatatacacacacctttcctccccaacccccaatcatttgaaggcatgttaaatgcatcgtggctctttattcctaaatgccttcgtgtgtattttctttttaaatttttttttatatttttcaatttttaataagagagacaaaaggtttcaccacattgcccaggctggtcttgaactcctgagctcaagccacctgcccacctcagcctccaaaagtgctgggattacaggcgaagccaccgtgtggggcttcagtgtgtgttttcttaaaatagggatattttcttacataatcgcagtgtagttattaatgtcagcaagttttttattgataaacatttttctctaatctgctacatatatatatatatatatacacatttttgtaaaattaactcagtaatgtgctttagagccttaaaaaacaaaaacaaaaaactacaaaacagtgtccagtctagagtcaggtggtattgtatttagctgcaatgtctcttctgtcacctttttttttttttttttttgagatggagtcttggtctgtctcccaggctggagtgcaatggcgcaatcttggctcactgtaacctccgcctcccaggtccaagtgattctcctgcctcagcctcccgagtagctgggattacaggtgcacgccaccatgcccagctaatttttgtatttttagtagagacggggtttcgccatgttgggtctggaactcctgacctcaggtgattcatctgcctcggccttccaaagtgctgggattacaggtgtgagccactgcatccagcccagtcaccttgaatctagaatatctccatagcttttcttcttattttatgacattgatacttttgaagaatacagcacttccctgctccttttaatagtggattcctcattttgggtttatctgatgtttccccatgattagcttcatgctgtgcatgtttggccagaatactccatagatgatgtgtctttctcagcatatcacatctgcaggcattcgattttcacctgtctccactggtgatttttttttttttttttttttttttttttttagataacgtgactctgtcagccaggctggagtgcagtggcaccttctcggctcactgcggcctctaactcgctgggcacaggtgattctcccacctcagcctcctgagtagctgggactgaaggtgtgtgccaccatgcctggctaatttgtgtctgtgtgtgtgtgtgtgtgtgtgtgtgtgtgtgtatgcatttttggtagagacgggtttttgctttgttgtgcaggctgctcttgaactcctgggctcaagtgatccgactgcctcagccgcctgaagtgctgggactacaggcgtgagacaccgtgtccgatctccactggtgattttaattttggtcaccgatagaagctcttgtctgatattatttgggcctacaaaaatggcaatttcataatttgacctaacataaaacctttttactgaggttttagatatctaacctgtactctctgacgctcggtttccctatctgttgagtttggagattgtttctgccccacgagtattactggaggggttaaataagatgatgtatgtaaaatctgccacataaaaagcattctataaatattagctattattattgcagccaggtcgtgttcaagggcattggttttgatcttcctctcagtctctcccaattccaagcaaaatctcaacagagaccagtgatggcatggggatggggtgagggagcctcacttctgccatctcagtttcctcatctggaaaatgggaaacgcctcccacaccacggggttgcaatgaggtttcatgaaatgtgtgtaaaagtaactggacatagaacaagttcttaaaaaatcatgtgggtgactagtaatctcttgtattaggaaaacaggaatatctgtcagaactaaaaccacgttctaacgtgatgtttcattttgaggcggtagcacggtgtgagtaaacatcgtcagagtctagggctctggaatttctttagcgctgtgtgattgtgggcagatgccttaccctctcggagtgtggagtgtatggtttgtaacagggagataaaacgggtgagagccccctaggactcctgtgttaataaagggtgctaacggtgccccccgagtgagcggcgcgggcccgcgcgcacccgcacgcctcgggcgccaggcgccgccgtgtgggcggagccgggcagcctcccctgtcggcgccagccacggctcccggccccaagctccgcccccggcgcgcatctcccagcagcggcccggcacctggcagacgcgcggcggcggcggcgagcggtggcgctcggctcgggcgaccgcggcgggggagggcgcggcgcaccgatgggcgccactgagaagggaggccagaagagccggaagctgttttccttgcggcggccgtggaaggcgacccggcggctgtggaggccacgctcagctcgccaggcggcgcagggtgagtgtgggcgcggccggtcgggacctgttaccctgaggcaggggcgcagcggcggcggggccgtccccggcggtctctcgggtcgcgttcccggccctgggagcctggatgcctaggcgacgcccgaacccgaccctcggtcgcgggtaccgggaccgctggggaagcgcaggggctgatgtcggcacagtctcctttcctctagcccctgctcgttgctttggctctggacacagggaagccacggtggcgcggcgacacagcctcactgaggttagcttgtccccggcccccagcacctggcctggcgcctgcaatgcagtgcctactgggggaatgaatcagaacccgaggctcccttcaaggtcctcccgccctgtacccacctcctctctacctgcctgcggtgatttcgaagctctcgccacgataaactatttccaagcacactcagtcctgtcctcgccagggcctcaactcacagccaatcactgactcactccattcattcattccacaatttttatcgagcccctccatctgccttggccggagaacacgatgggcaaagcccggatcttggaactacttctagagaggaagacagacattacacacgcaaaacagagaaagcccggtacacattgctatgtgcgcttagagggaatcagtctgctgacagaggaaaaaaggcaggtccccgagcttccatggcaggcggactgggaaggcctctccgaggcattgcaagtcagcggagacccgaggactgactaggagttactctagcgtgaagccgagtaatagagaatagcaagtggaaaggttcccagagtgcctgaattgagcaaggggaaagagagggatgcagggcctggatcgaggtctgggcagaacatgaagaggagttcggattttattctacgtgagctgggaaaacactgaagtgtgctaagcagggaagtgacctgatctgggggctcccggcttttctctgtctgcagtgtccatgctcgcatctcagcctgccggattcctaccctcctgccaagactagcacaaatgcagtctcctcgctgaaatctctgtggttcctgccacctgtaacccctcctttagcatttcgtcacctgtagagcgtttgtcactgttcatctggtattaaagattccacattctcatccatttcatctttgcatcccccacgaggctaagtgcagggcttggtactgtgtagatactgcttatgaatgtgtcttgtcttgtcctttttgtctgtttccatcatctgaggatccttcctctggggggttgacatgccttatttctaaaatggccgaccggatgcagggcagagccagattgcaccaggaccctgccatcgatatagtccccctcacccacccccggtgttttgaggattaaataaattaatgaattaaacgagttagtagttataaagtgttagcacctattaagcattataaaaataaatttgaaaatgaccagcaataattatctttcaaatatttatttattgcattggaaacaagcttttctattggtggttgttagggagactctgcagcttgtcattgtcatcttgccggcttttaagtatgtgttcctactttttaaaagtcagtgcaccaacaaaattctttccatactgtcatcaagaactattgctgaggccgggcgcagtggctcacccctgtaatcccagcactttgggaggccaggcggacggatcacttaaggtcaggagttcgagcccagcctggccaaggtggtgaaaccccgtctctactaaaaatacaaaaattagctgggcgtggtggcatacacctgtagttccagctacctgggaggctgaggcaggagaatcgcttgaacccaagaggcagaggctgcagtgagctgagattgcaccactgcactccagcctgggccacagagtgagattctgtctcagacaaacaaacaaaaagaactattgctgaaacttaatagggccgaaggctgaccactttttatcatgagcttgaatgagatcgatgattgcaacaagtattccttgagtgataattacatgcatagtgttattccagatgttgtgtgaatgcttacaaaagaggaatagatgaatattgccactgtagtaacttggattagaataagtgttctagttttataatttttattttaatttttaaaatctttaaagttccgggatacacatgtaggatgttcaggtttgttacataggtaaaggtgtgccttggtggtttgctgcacctatcagcccatcacttaggtattaagcccagcatgcattagctatttttcctgatgccctccctcccctgccctcaccaccacgggccccattgtgtgttggttccctccctgtgtccttgtgttctcattgttcagctcccacttataagtgagaacaactggtgtttggttttctgttcctgcattagttttataatttttaaaaccagatctttagtgcctatacaaccatctccgcttctgcgttcctgacctagcgtttactcacagcttcccagggctcattgccatcccacacctctcttttcttagataggatcttggctgctcactacattcctctactatctatcttccccttcccccataagccctggggataaagccattataatatctaatgttacatgatacttgacatcttatagaatagttcaactacaggattttgtttagatcttgacaatactcctggaaggagagagggcagatgttatgtatttcccccattttatatataagggaaggtgaaacaagcggcactaagtgatatgctggaggtcatgtgactggtgagtgtcagactcaggcctgcctacctatacaacatgctttctgccacatctccctccacacatgaaaaaacatgtttcaatagctatactcatggaagagggaagtaaaacgaataaatattatgcaataaatctatatctcaattttatttgattttttaaagttaacctgaatttcttatgatgatgttaacatcactttgggcatctagaatcatacactttgacatcacacaggctatgatttaaatctgccactaataaatggcacattaataaactgtgtgatatcagacagcatccttagtctttcaaaaatggagttatatattatctgaaaaatgaggatgacaattcctatgtcatgtaactgtgatgattaaatgcatttctggtacatagaggttcacaaagggctggttatttttaaattaatattaggtttactattgtatgtattaatattaataaaacaaaacctaatatggttgaaaatctagactattcttagaaaatagtctagaaaacctagaaaagtctagaaattattagcaaaccataatattaatatggctgaaaatctggactactattagtatactattgttagtatagaataataatagtctagattttcataagagtccagactactattagtctagattaatgcttagtctagatttcaaccatatgatcacactcaaaatatgtttaaaagttcagtgtgctctgggaagcaaccacagctggaggcttctttgaggaagttaacccttctgggtcaaccagaaggtcttctgcagcagcatccatctttctaccaccttcttctttttcatcaggaggctgcaggggagaaggaacatagcttctagggactcctgtcatcttttcatgctaacactgtgtcctgaacatagcagacattcaataaatatgtctggaatgaaagattcctttcatttatatatatttccaaagagaatgactctgaaatttacactgtgaacatttgtcactaaaaatatagcataaatatctagaaggacaattactgcatcaaagtgtatatatatatatatagttttgattttgagagatattgccaagttgacctttgtacatttgtgctaattcagtttctgccaacagtgtgtaagctccccgattccttactgaatatggtcagacttttaaatgcttgctaatttgatgggtatgaaatgatattccatgttgttttatattgaattttcttgatgaataatgaagctgagtatcttttcacatgaatattggccattcttgtgtgaacctttgtgaaaggcctattgatgtctttctcatttctttaacttgggttttttttttttctatccattttaggaactctttaaatattctggatatgaattatttgttggtttagaggtctaaacaacttttaaaaatgtacttaatcatgccagtagttctaaatgggaatatgaacaagctgtgctgagttgaaattaaccctccaaatgcttccgtccattccagagaaccatattttactcaaatatcaaagtccgtaggttacagaaaagggagcaaatgacaaaagcattttatgagcagtagacttctctagcccttgaattatggtagataactggccttgagttcctgccaccagaaattccctcctctaaaccctgtggtggttgaggagccctttcctgagctgtggtattctctgggaagacacaggttggaactagagtcagtttccatcagtagatagtattttgcagaacaatttacttggagaagaaagaggacagaatttctgtcacgtcgatcagtggtttattctctcactgccattgtctagccatatgtccctaaaaataagccacattgaatggatgtaatgatccctacccagcctattcctaaggatattagagagatcaaatgagaccataaaaatgaaagggctgtgtaaatacaaggtttgttagccaggctctgggaagtaaccaacactttgtcagagtgggaaaacctcactgacccacaatctttgggtctgtggctctggcccttctcctaccacctgttctgcatacaggtgcatgattgtagagagctgtgcttctccaaggttggtctccagaccagcagcatgagagcagcagcatcagcatcactcaggaccttgttagaaatgcaaattctaggcccccatctcagagctaccagatcacaaactgaggggtgggaggatggggagggataggaggctggaacctggaaatgtgttttaataaactctgcagtaattctgacacatgctaaaggttgagaaccactgacttagtaggatgagcaagggttttacagccagcaaatgtgggtttaaatctcaactctcctacttgccaacttgtgacatgtaaattactagaccgtcttgggtttccaacctctcaccactaaaaggaagaccgagtgtggtgtagcaggtgaagccactctccttccttcccatttcctttacaggactgtgtgagaaataaatgacatgacgattctggactctgctgtgtttagctgtgtgtctcctttggcaagtctccttgcctctctgcctcatttttctcatctgacaaaacaaatggcaagagttaatgtgtgcattgcttttgtcacactatgtgccagccactgtcttaaagagtatgtgattttattttattcttacaataaacctgttttacagctttcattttacacataagaaaaactgaagcagagagaggttaagtaacatttccaaagttatacaactagtaagttgggattcaaacccgggaggtctgctgtgagtccttgcattaaagacaatgcttgccaagtaataagttctcaaaaaatggatgatgatgatgatgataagaaaatagcctggcatatagtaggtactccatataagccatgctgccctcttctgtggctagccctaatcctaaacatctatcccctccccgcagtaagcacattttctttttccttctcacctcttttctggccatttgggtgctctgagcaagccagacagaggcttggctggatgcagaaagaccaaatgtggtgttgcaggtgaagccactctttgggaatgaatgactaagctagcagaagctctagacaagttattgaaagatcatttcatctgcctaatttggaatatatattctgggtctctgcttacctatcaactaatcaagaattaaaatgcctcaaaagttccaagggagtgtaaaagcttttttttttggtgcccagtttttcctcagagtaaaatttgcagctgggaaagtttaatccacagtatgacagcagtgtttttttcctttcatttttgtttttttgctcagacaataaaaagccttattccctttcaattcagggtttcactcgttgttcttgaaaattcccttcagtttagctctcaagatggccttgcttgctgagcatgagtcactggtttagtgactcagagtggcatctaacaagacaaggatgtgcagggttgtcaagggacttagtggccagtggagcctgcctgaagcttttcctaaacccagtttttgagatagagcatcttttccattagcggctgttcctaatcatcctcagtaccagtttatctgaagcttggggtctgacagagacattgccttgttgtggaaagctctagaatccatccttgtccttaactggatgtggccttgagatttactgtgtgacaggacaagacttctgagagttcacccagctctgcttggaacggccgcagaatcaggaggcctgtgcttctggaaatatggtgtcaggagggaaaataaagcctctttttatttgatgaggccttcaaacctctttcaactttaggagaaaaaagatcaattaaagttggatagagaaacagacacatgtgatgaagcaaatatacccaaatatacttggatatggggcccactgtacaattctttcaactttttgatatgtttgaaacttttcaaaatataatgtttggtacaatgcagatacccctagaaatgactacacttttgaaaacattattccttttgcaatataaatgggtgttttccttcccttctcccacttcttttctactcctagcattggtctttttaaaattttggtctagggagccttcttgattaaaaagggcctggaatagttagaaagaatgaataagacctagtacttgatagcacaacaaggtgactagagtcaataataatttaattgtacatgttaaaataactgaaagagtataattggattgtttgtaacacaaaggataaatgcttgaggggatggatactccatattccatgatgtgattattatacattgcatgcctgtatcaacatttctcatatacctcataaatatatacacctactatgtacccacaaaaattaaaaataaaaaaattttaaaaagggccggagtgagggtggttggtgattggctattcctttatgccaaagacttcatattcttcttcatatgtaattctcacaataatcctacaaactagttattaatttctgtattttatgaggaaactgaagcttaggggaataaacttgacccagttacaaggtaatactactcatcttacagcatttatggagcccttacttgatgtgtcaggctttgtgttatgaaccttaaacctattaacttgtttgagcctcaccaagctgtggaaggtgggtaccattattacctccatcctgcagatcaggaaatggaaacttaagagaggcgcagcaacttgtctcagcttatattccaggggctggtacatggcagggcccatgtttgaatccattctctttatttattttttgaggcagggtcttggtctgtcacccagggtctttcttgctctattgcccatggctcactgcagccttgacctaccagactcaagcatcctcccatctcagcctcccaagtagctggaccacaggctcatgccaccatgcccagctaactaaaaaaaaaaattttcatagagacagggtctcactatgttgaccaggctggttttgaactcctggcctcaagcgatcctaccaccttggcctcctaaagtgctgggattacaggcgtcagccacctctcccagtcctcttctgctttagagctcttgccctactattcaaatccacgctttggcatttctttgcctactttggtaaattggcatatctagtggaagcctcttgacctgaggccacaggctcctgaggacagagaatgttttgttcagcaccgtgtcattcctagtgttcatagcagtgcctggcaccatgaatattattgaataaaagagtgcatgaatgatggcttctcaccacctactccctcaccttctcagccccccaaagtgctcctcttgggcacattttggctatcctggacttggtccttggagataaagatgccggtttctctgatgtggtttagccaatgtcgcatttggtggccagtaaggagttgtaatgaaggcagattttccttattggtcttaagctgtcaaagacagcagaaagatattatccactgccaaggaaagatgggaaccaaaaacaaatacttaaagtttcccaaaactttcaaggaatcttccagctgtggcaacaagaagtccttagtagccatgaaagctctcacattatagctatgtttgactcttgggttgaagtaatgaacaggtgaacactgacaattagtcctcttaaatgtgcccaagcagttggtaattataccctgcatttatttagtgttttgtttacaaaattctgttctcccttttgatgatatgaacagcccagtacatatataggacagctatgattattcccactttacagatgagaaaactgatgccagagaggttctgtcatttgccctacactacgcagctaataaaaggtagagacagtagagacaggtcttcaacccttttaatgcctagtccaggaaatttttaatatcaatattgcatttaactcagtaatttctgaggatgagtaacaggaagatgtattcctttctgttgctcttcttccaatttagttaggttatgtatttgagtcagttagtctttctggataccagtttgctaatctgtatcatggggaataaacaccatccatcagtgagtatgcatgaagcagaggagactgggagggttcagaacttaaaaaacaatttctgagtgaagctgtttggaagagactgtgatgactcttacctattatccataaaacaaattaaatggcacctcccttggcaaccctacctaaaatggcacccctgttacctcattaccatgtttcatttttcttcacagcatttattgccatttattatatgtctatattacctgtctgaatcctcccaccagagtgcaataaccaagaaggcagggacctgaaaccctaagaggtggaatagtgcctggcacaaataaccacgtgttgaataaatgattgaattaatgaatgaatctgagctgtggaatgattcaaagtaagtttgaattgaatgactgaaagatttacttgaatcctccttgctccccaacagaggggtgttatggtttggcatcctcatacatattcctagtctgccactcaatggcttacaaccagtcactaaagcctccttgagtatcaacttaggcctgggtgaaatgggttcaataacctgtgtccatgcagcagacacagcccattatattgccctgtatgcctctgtactgtaacagcctgtgagcagcgtgaggaccgagggctggtcctgtgcactgttgtatccccagtacttagcatacagcctggtccacagagaggtaaaataaatgttgaatgaatgaatgaaagtacagggctctgaatcctcctccaaagctgacttaccatctgaaaataaacctggtgcatggcacagacattcccctttcaattcagagatgaggaggcgctaaacagttggttccctatcctgagggaaggaaaggcaagcctcggctccagatccggttccatgccatgttttggaatttgtgtttacgtctgccttcatccccatcctttccgctccagcataagcaaaattataaccccgcacaccgacttgcatgcaattatcatagcccgagtgctcctccgttgagagacttcgcccccgagaccgctgactgtgaatgacaaatcaaaagtcagggttgcagaatcagccggactttcctgctcatttgcagcagagggaggaagcagagaatgaaagattctgaaaataaaggtaaggggcggactgcagaaagatggctaagagagggctaaaggctaaaagatgctagggatgcgatgtcactccacagacatatttagtttgtattaatggctagtttaaaattaccatacctatattaacattctagttatataataaacatgatgactttaaaaaatgactagcttctagtttccaaatattgtgtcattcagctttccatttttatagtcctaaatataaccctatttttgcattcttaatcttggctgagtaacacagctttcatagatttccttagactagctcccagatttttgataattttattttgggggtgttcacaatagttaataatgaatatacaggttttcaatgcattatgagaattggaatatctgaaataattgggacttaaaacagtttgggttctgaaggcaaacgctgacggagaatcctttaatgaacattaatctttttagaagcgctccatggggagccgtcgctgaccttcagaactgtttatcttgcaaagaaatgctgggatgtaaactacccccactccatcagcctccacaccttacctccccctcacctcccaacactctaattctgttagagggatgggggaagagagaaacgaatttaaataaaaactcaaaaaaggaaagggctaaccgaaaaatgagccaaccaaattttaagttcaacaacaagcattctggaggattctggggttttaaattcggaggctccttaaatattctgccgcagttgggggaggagcgatggacccctaggtctccggaggctacacgtgttccccgatcccgtttccagggggagcccttccttcctattgcgctggtcgtgctcctggcccgcgtgcccaggaagggcgcagcggagtcgcgtgcccgtccgggcggaggacgccgtctccgcgcggcggtgccgggcccctgcttccggaacgctaattttagggttcgccggcccccctttcttttcacccgctttccgtgcgagccgctgcgcagcagtctgcgcttcgagtgcgctgtgttttaaggaggccccggcgcttgccccttgggctcgggggcttgggtgcgcaggtgggggctggcacgcagcccgttgggcaggtttcgcgcagcgaccctccccacgccggagctaagttctttgggtgagacgtgcaacaacgcaggccccaaagctctctgcgcgcagcgccgcggggcttggccttctccagtcctcgggagtcagccaccgtctctggcttgttataggattcccacctcgtggtgggcaatgatatatacatattcaacattagaaaaagaaggaaaaaaaaaccccactcacaatctaatgccaatggagagaatggtattttaatctacgaaactgtaatgaaggctcttaaacaatcccactttccataattgaggctttcaaaagggccaggtagctggtggtgtttgtattaacatctcataggctctggatcattcacagccacgtattgatctatgtggttttgacgtttaaattttaatgaagcagccttagtggggaagaaaacagctatgcatgtgcctggtaagggggaagaggacctgttcactcctgtttctaagccagcatcttaagagtaggtattacctgtgtgtgaaatcaaagtattttaaaattaactctaggaagaatgttggattttcctgtgttgttttcagtggttggagaaagggtttctggagagaaaaaaaaaattgcttatttgccaagtcatgctaggccatggacatgatttagaaaaaaaattaaagctgcttgaattggaggcccaggttaaggttaatattcaacattgtttgaaatggaaacactcctggtttctcagtgtatcagtgtgttttaagctcagatccccagcctttttctaaggagagttggtatttagaatttttttttttttttttgagatggagtcacgccctgtcgcccaggttggagtgcaatggtgcgatctcggcccactgcaacctctgcctcccaggttcaagcgattctcctgcctcagcctcccgagtagctgggattacaggcccatgccaccacgcccggttaatttttgtatttttagtagagatggggtttcaccatcttggccaggctggtctcgaactcctgacctcaggtgatccacccgcctcggcctcccaaagtgctggagttacaggtatgagccaccgtgcctggccggtatttagaatttttgttttactttgtactgggaagagccttgggttgggagtcaagattggtaggctctggcttgttcagttataactcatttgtgacctaggacaggactctatttctttgggtctcagtttctttatcgctaaaatggagagctattagactagattcctgtttttcagattgtgagtggtgagaaagcaacttagtgagtcttaggcaacattttagatcgatgaaatagaacagaaactgtcagaaatcattgcacatagcagaggtaactactgtttcctgaaacttctgttatagatatttatctttatgcatgtgggtataagccgtattctgacatcacatcggtttttttttttcctgtgagtttcagtcaaagaagtttgaggaacactgaaataaatcatagctcagtaatggttttcaaggagtctgtgaaatgcagctttatatgcatatatatacagacagagagagagagaaagagagagtcaatagttttcctcagatttttaaaggattctaagactccaaataggttatgaattactgtatttctaaggtcccccaggccttttccaagcctagttctttgagagcaaagtatccctttagggctgctgggagatgggtatgtgttgacagagaccagataagtgtatggtgtgaggtggtgtgtgtgtgtgtgtgtgtgtgtgtaggtgtgaccatagcaaccagaccgtgagagccattcctgggtcccaaattaccagttggtgtcctgaatatgagacataaaaacactaaaaattagagtctctgtgttgaaaaggaccacaacaaaactattaaaatattatgaattgtttggaagtcaattctttttgtaaagactgaaaaagagaatcaggtaaaattataagaggttgatggggcaaagaaatcaccaggatgttgcaggttcagaaagtgaatttttgtaagctaccatcacatgagtggttcagtaaatgttgacttgtgccttaagaactgcctgcctgccttttccatctttttagttcatcttagggacaattcagtgaggtttttaaatacaaaagacattgtgtaacattgatctagcatatctcaaaatgttttgcaagccaggaaaaagaaattaagtataaggcaactaaaaagaaaatagttgagtgagttaataagtagatattggcaaacatgacagctaattataacaataagaaccatagctcctatttaattaacaactgttatgtgaaaagctctctgggaggtgctttacatattgtcacaacactgcaaggtaggtggtattttattctgaagaaatagattaagaattttgtacagggatacatagctagttaatggcagagccatgattcaaaatcaggtctttttttatctccaaaaccattcacatggtaggcaagtacttgaaaataagtagccctgtactctgtaaaattacagtttttaataaaattgtcaacatttttagaattaacttacctatataaaaagggagatgtgaaccttagaaaatgatggcttttgactaattttttaggttgtttttatttggaaaacagatattttaactcttcaaattcagctccaaattttctttttactaagttctttgagtatgttatgcagcaaggtcttagaggcacaaaataataagaatgaagactgaaaatttgggtgaatttttttttggtctataagaggtcaaagaaaatagttctcattccaatttttctgttatttttctagattttattttaaaatggcaaacatggcatttgtttagcaaacaaagttacacataacattttaatagtaggatttaaaagttgtcatgactgggcgtggtggctcaacctgtgatcccaacactttgggaggctgaggtggcagatcacttgaggtcaggaattcaagaccagcctggccaacatggtgaaaccccctctctactaaaaatacagaaatgagccgggcatggtggcatgcacctgtaatcccagctactggggaggctgagacaagagaatcgcttgaacctgggaggcggaggtttcagtgagccgagatagcaagactgcactccagcttgggtgacagagtgagaccctgtctcaaaaaaaaaaaaaaaagttgtctatgccaatggttcctgagataacttttcactggaagttattacaaaatctaattgggtttgagcagggtcagattcagacttttaggctctaaatattaaaaaatagtgtggtgttcatcctccaatctgtaattcaaaataagtgtaaaaaaatttttaaaaagttgtgatttttcttaaacatcttgactactttgatacttttagagaaaactcaaattctttcaaggatttttgtcactgctgcatgtgactgggtgagttggtgaaatgatactttagctggggtgatctgtaaatgactgagtgacttctcaaagcttcaggggtagcatgtggttaagctgggattagagactggtctatgccagtggtaatcaatgggtctggtattgctttttgggctacacactggaaatctgcaggtatgttatttgatggtcatatgattgaggggcgctgccattggcagaaactagaaatgatagtgccctccggtgttctgggctgttccattcaatgatgaattagctcatgtcctgtgcaattttcaaatgttttgctgaagatgtagtaaaaccttctatacttttctgggcttagaacataaattggtttcactgtacactgaaacttccaggattaaaaatgctgtgtaaatctaaggaagattatactgaattttgttcaggaaatcacttacccaaagcaatgccacttgtgttttagacaccagtacaacacacctgaatcataaaatctatatacaagtgcaagtagctacctacttaattatgttttctaatatagtcgtctgagcatttgcatattgaaatacatgttgctttattgtaaataacttatttcacttctcttttacattacagttgaaacgtatatgtatatatatatacatatgcatagtttaattttgtgttaggttatttcatctttaaatttcattttgagatactaaacaagaaaatacaaaatatttttatatgttactcagagtttaaaaatgacttgatttttacccctgaatgttttaaaataatttgaaccaacattaaaacttttggagactataggttcaataaggtatttatggcttctttaataaagattagagcagtctgcaacaatgagattgagctgagtataaattaccctctttaaagggcagatatactgggttataagggttataaatctctaaaagtgatgttactggtcgttgattatttttatgctattgttactgccacttacatttttattttttgttttactattattatttttgagatggagtcttgctctgtcactcaggcaggagttcagtggtgcgatcttggctcgctgcaacgtccaccttccaggtttaagcaattctcctgcctcagcctccctagtagctggaattacaggtgcacaccaccacacccagctaatttttgtatttttagtagagtcagggtttcaccatgttggccaggctggtcaccaactcctgacctcaagtgatccgccacctttggcctcccaaagtgctgggattacaggtgtgagccacttggcctggcaaaatttttttaaaacattttatttatattctctcagcaggacaatcttcctagcataactgttgagggcccctccagtctcaggttttgaccttgttttttatttttttttattaacttaaaaaacattattattttttcatttttatttttgacttgacgataactgtatatatttatggggtacaatgtgatgttttgatagaaatctactacattttggaatgatcaaatcaggccgattagcatatttatcacctcaaatatttatcatttctttgtgatgagaacatttaaaatcctcttttagtaattttgaaatatacaacacattattattaaccccagtcacagtgctgtgcaataggacagcaaaacttattcttctaactgtaactttgtgcctattgatcagcattgcccctttccctgcccatgcccccacctcccagcctctagtaaccaccttttgattctctaattctgtaagtttggcttttttagattccacacacaagtgagatcatatgatatttgactctctgtggcactttagaatttcattttctaattgtttattcctgggatgtagaaatagaattgattaggccgggtgcggtggcttatgactgtaatcctagcactttcggaggtggaggcaggtggaacaccagaggtcaggagttggagaccagcctggccaacatggtgaaaccctgtctctactaaaagtacaaaaaaaattagccgggtgtggtggtgtgtgcctgtaatcctagctactcgggaggctgtggtgggaggattgcttgaactaggaggtggagattgcagtgagccaagatcacaccactgtacactccagcctgggcaacagagcgagactccatctcaaaaaaaaaaaaaaagaaagaaatagaattgattttatatgttgaccttatttcagtgaccttgctaaattcacttattaatttcaatagtttttagattttaggggccttactatgtagaccgtttatttttctgtaaataatgacagctttttcttctttctgatccttatactttttcccctttgtctcattgcactagctaggatctctcttataatgttgaatagaagcagtgatggtgagtattcttatcttgttactgatcttaggggaaaagctatcacattttcaccattaagtacaacatttgatgtgggatttatatggacacttaaaaattagattaaggaagttaccttctattcctactgtgctaagtttttatcatgaatcagttctgagttgtaacaaatatttttctgtattatgtgcatcatatgattattttattctgttaatatggtgaatttcagtgattcttgaatgttaaaccaactttgcacttttggaacaaacaacttcgttgtgatatctttttatatattgctgtatttgacttgctaatattttgttgaggattatctttgtccatgagagagattaacctgtgatttccttttgttgtggtgcccttgccacattttggcatcaaggatatgttgaccttgtaaaatgaattaggaagtatttcctatttctctattccctggaaggtttttgtgagattagaattattctttaaatgtctggaagaattcactggtgaagccatttgggcctggaaattttgttcttggaaggttttaaaatatgtttttttgtttgtttgtttatttattttacttttgtaaagatgaggtctcactatgttgcccaggctgatcttgaactcctgacctcaagtgatcctgccaccttggcctctcaaagtgttgggcttacaggcgtgagccactctgcctggcttcagttgttttaatagtgtatgttattcagatttcctatttttgtgtgtgttttaataaattctgtttttttaggaatttgtccatttcatctgaatttccacatgaggttttctttatattctcttatgatctttaaaatgtttttaggtggtgtggtcctgtccttgttttttatttctgatagtggcatttctatttattgtcctggtaattctcacttattttgatgcaatattgtcaaggtcttatacatttgagtagtctctgtaatcttttactggttaattttttgtattatacatttatttttcatctcatgagttcttgcttttgtctttattatttcctcttacactctttggctataacttatgacttattttttagttttttgagatagaaggtatctttgattttcagcttttcttttaaaaaatattttcatttaaggctacacattaatatcctttaagccggccaggcgtggtggctcacgcctgtaatcccagcacttttggaggccgaggcaggtggatcacaaggtcaggagtttgagaccagcttggccaatgtggtgaaaccccgtctctactaaaaaattacaagtattagttgagcacggtggtatgtgcctgtgatcccagctactcgggaggctgaggcagaattgcttgaacccgggaggcggaggttgcagtgagccgagatcacaccactgcactccagcctggatgacacagcaagactctgtctcaatgaaaaaaaaaatcccttaagctatatatataatatcctttaagcatagcttttgtgtacacctgcaagtattgttatattttcattatttagtttaaaatattttatacttttctttttgatttttttgacccataaggtagtgtaacaacatactttttaatttttaaacagttggggagtttctagttctctttttgccattgatttctagcttgctttcactgtagtcagagaatatattttggatgacttggaaatgttttagacttgctttgtgacccttcatatgatcaatttttatatttatatgttgtacttaaaagaatgtgcatactaagatagtttggttccatgttctatatatgttaattatttcaatttgttaatcctgaggtgcggatcttctgtatcctcactgatttttttctcattctgttggttcccaagagagggcaaactcttccattataattttagatttgtctatttttccttttatatttgccaatttttgctttactttgtggctctgttattaggtgcataccatatacagttatagttgttatatcttcattatgaaatgtctttccttatcttgagcaatactcccttataatctacctttttgatattaatgtagctataccaactttctttgtgttaatagatacatggtagatcttttcccatttgtatactttttcttttttattattattatatatttttttgagatggagtcttgctctgtcatccaggctggagtgcagtggtgtgatcttggctcactgcatcctccgcctcctgggttcaagcgattctcctgcctcagcctcccaagtagctgggactacaggcgtgtgccaccacactcagctaatttttatatttttagtagagacagggttttgccatgttggccaggctggtctcgaactcctgacctcaggtgatccactcaccttggcctcccaaagtgctgggattacaggcatgagccactgtgcccagcctatactttacttttttctatacccatatatgtaatctgtatcttttagaagcagccataagtgaatttttaaaaatctagtctgacaatatggtctttagtttgaatatttaaaccatttaatataattattgatgtgttaagtgctatagctaccatgttactccttgtttcttatttgtgtcccatctgttttatataccactttcttttggattaatcaagcattatttttaactttccaacatattctttacacatttgttttcattttacttttctttgtgtgtatgtgcgtgtgtgtgcctgcgtgcgtgtgcaagtgattaccccagtgcttcttatatttaatcatgtttcagacaatgttaggcgcttagaagactttaactccatttaccctatcttctccctcacctcactttctgccttttgtattattattgtattttgttttaattatacatttattaaagccccataggacactgtaatgattgttttatggaataaatattcatttaaatttacccacatatttaccctattcattgcttttcatttctttcggattttttgtgtattccctctgggatcttttccttttgcatgaaaaaaactccctttaggatttcttgtagtgcatatatgctagaaacaaatattctcagtttttatgatctggaaatgagttgattttgtctttgcttttgaaggacaattttactaggtgtatagaattatggggaagcaggtgttcccccagcactttaaaacatgttatcccattgtcttctggttttcatcctttcttggaaaagcaggctgtcagtcagtcttatgttgttatttggtgttgcatcttttttcttcggctgttgttaagacttttctcaattgatttggttttcaacacttgtcccaggtgtggttttctttgtatttatcctgcttggggttttcagtccttcttgaatctgtgcggcttgaggttttttgtaattctcataattccctgccattatctctccaaacagtgttttgttcctttctctctttctgggactccgggtacctttatgttagaactttttaccctgtcccatatattccttcattttctgtatacttagcccttttctttcttttttagttttgttatttttttgctggcctatcttagagcttactggttctctctgctatgtttaacttgttgttacagaaccattaatttcttaattttgttttgtatttttcagttctagagttactattagattctttttttttttttttgagacagagtctccctctgttgcccaggctgcagtgcgatcctggctcactgcagctttcacctcctgggttcaagcgatcttcagcctcctgagtagctgggattacaggcatgtaccactatgcctggctaatttttgtatttttagtagagatggggtttcgccatgttggccaggctggtcttgaactcctggcctgaagtgatccgctcaccttgacctcccaaagtgctgggattataggcgtgggccaccgcgcccagcctctattagattctttaccaaaagagattcttcaccttgtcatctgttttctcaaatacatacatcacagtcatcttaaaaaactttgctcagtaacttcaatgtgtgggccacttgtgagtctttttatctcttctgtttttcttcttggttgtctttcttcatatgcctggcaattttttattatatgtccagtattgtgtatgaagatgctctggatgatgtcatctacctgttgagagtatttttcctactctttgtcagaagtagaacagagatcacttcaatcaggcactcagtctaattaaggctgttttgcagacttttaaggtttagtctacttctggttctcctaatcccaggcccctagggaaactgactgagagtctgagatgtttctcaccaccccttccccttgacagaccctaaactctaatttttgtctctctaatactgtgaacttgctgaaaactctactcagcaaaatgttcattgtgcttttcatttgctttctcgttggcttcttagcctctgctctgggcagctgagtcaggaatatctgaaggagaaaactcctgtcaggctgtgagttactctaggatatgccttttcagtcctaaactccactttttgtctctgcagcccttgaaactgtctaaaattctgcaggcttctctgtgtcttaacagctgccccttgcctggcttttcagcttcttaccccatgctaagaattggcatataccctaaataggaaaatgggcttgcagaaagtcaggctcacctcagtgagcctcccctctctccaagatctggttcctcaaatcgtggctgattagtagctttcctattacttcacacagatgtttaaaaattttatctggcttttctaatttccctcatcagaaccagtctgctacaacctactctattaaagctggaagttaaacacgtctgtttttttttgtttgttttaagtggattatgttaaaaaataaaaatcacaggccaaaaaccaaggtaacaatgtcattttaaacatgtaaatttaataaaggatatatgttgatttttagttactctttcttgccttattaaaagcttgtcagtaccttttttcatatgtactctgaaattcttacaaatatatgttgctttgttccagagaatatgtgtactaaaagactataatttttctgagtctggttctccattcaaatgttttaatacttttgtgattttatgatttgtaattgtcgactctcacctcccaattcaacatgatcctaaaatgtacaaaataatttgaatgattgagtttcaaaaagttttagaaaacttgatcttgtaacttttattccaaagctttgttgagggggagaagtacaggcttctgcctttaagggtactgcttcacttttggggcaaaaaagcaagggttttcaaagggggacttgacatgaatggcatgcaggggagggggtgagccagtgggggtctcaatgacttgctttggtgctttatctaccaggtggttgagctggtgccctcgcgggcagaactaggtggtaaggtggccagagtcttgagatactctccaagtgggagtgagtttcatcatgggcatactttaggttataatttgttatctctcgaggcagtctcctggtcgaagagacgtctggctctggagcttctaagtaagcaagagcttccaagtaagcacacagataagcttgccctacagggagtgtctggtgaaggaaaggtaaatgttataattgcatttctaaagagctaagtaggaagtggggaacaagggaaaaggaggaaacagaaaagaagaaaaaagtattttttaaaaaagtaattctttctcttagaaaaaggtgggtacttggttacagtctaaaccctttaccgtggctgagtaggtattttttcagcctctttcccaggttgcgcgctgcgtttagtgctgtcattctcatgtgcttcatgtcactgccaatgtgttcagcctctcaaatgcaagctccgttcatttactcattcatctcatatgtttttgatcacttatgtgctcaggtctcctttttcaaatcaatattatggcaattctagtaaatgatcagggaaattaaataggtcaattcatgtgacatagttctgaaaggcaacagagtgattggtggaattgtggaaatgtttttcacatttctccaaattttcttttaaaatcagacaaacaaactgacacttacttttcagtcttttcagatatgttccccaactctgactctagtacttgaaaatgtactaagtaagagggctttgggatgccagaaatagtctgttacttaatctggctgctggtttttaaaccagtttgtgaaaattcctggagctcagcacatggtttgttcacgtttcagtatgtctgttatactttaataaagaaaatgaactttttactgatagagtaacaaagaaagtgccaaagagaaagaaagcttgagaacctctgatcaagttcagcctcttcatgttatggacgagggaattgaagcttgggaaggaaaaattacctggggactgggggaatgtctcataaccaggacttgtactcaggccttctgactcctagttcatctgactttcctaactcattgatcaggaaaggggtggggaagaatctggcatgcgctaacattggagctgggcgacattctcagaatcccagatgtatcctgcgagtcagcacttcactccctactctttctgccctcctccatccccttccccatggcagtttaaaaacagacacttttatttcctgcaaacctggagatacttgtttcatcacctaagaatcatttgactgcatatgctgagaaaaagggaaattcgtgcctgtgaaatctaacaagagcccagcacaaggtatgtttgatcctcttttaaagccatttttagtttggtgctgtgtggtttaaatttagaataacatttctacaactttgggggaggggcggtgatggtggcgtgcagagattgaacccagctgtgactcctgctgctgtgagataaatgggaaaatctgggaaccagtgttaaaaggagagggctctttagagaggtagctgcagggaaggggacgtgccttaattgggatgggggtggaggtaaggccaagaaacagtgggagctgtctcctccccctcttgccctgtgggatctgacctactgaaaacagagtgaagactatttctgatctggtttggaaatccagaatttaatattaaaatacacgttaaatatttcaataaataaatattaatatgttaatattaatgttaagtcagaatgttaaaatatacatctaatatatatacacatacatgcacatgcatgcacacacacacagcttggaattggtagtgtcatcctggcttcattttacattctcaaaggctagatgttgggtttccagagtgctgtttcttctgcctgaaatacattttctctcctatttgcctggctcagttctgctcctctttccagtagtagcttcctctgactctaggtctccttcccactcgctgcctataacaagtttccagagcatcctgtgttttcccttttgtgtcacttcccgtatttttaattattagatgaaatttgggcacggcatatgtccttaatacatagagaaaagaagagaagacaaggagtcagggaagataaaagaaagctacccttggatcgcttcttttaaacttagcaaggtagacaggttccttaacttctctgagcctcagtttcctcactttcaaagtgaaaatagtaatacctaataaggttgttgtgagattagaacctaataaggttgttgcgagattagaaataatatattaaaggcacctagcataatatctaacacatagtaggtactcagtgtaacataatttaaaatgtatatatactcttaaaaggaaattatgaaaattcagaaaagcacagagaaagcctgtgaaaacattcattgtcccgtctcttagagataattgctgttaaattgagtggattctttttctgtgtgtatctttatgtatctatataatgtactgagttcagattattcatatttttttttcacttaatatgacggcccaaacactctccacatttttagtgtctgtaaaatactgccatgttatattttgtaataataactgggccttcagttattaaaagaagatttagaaactgacacttgatccattcaaactctacttttaccaggacaatatgtttacgtgttaggaggataattcatatccctgggtaaacaaatgatgtagtggacaaggtgcaaaaggactcctccctccattccttcttctctctctctttcagcctttcttgcttatttccatggataggagggttattttgatttttaaagtaatgaggcaactaggtgaaatgaagaaatccattggcctggaagttaggaggtcagaaattttccttcttacagtccagtcactgactcactttaaggcagtcttttcattttttggtctaatttttttcatttgtaaacatgggagaagtgggttttattagagagattttcagactgggcttttctgagtgagtgttagagttctgtggagatgttttttcatattaggtagatttcctctcaagggaaaattacatggctaaaaaaaattaagtttcacgtttcaaattttattttattttttagacagggtcatgctctatcacccaggctggagtgcagtggtgtaatcttggctcactgcaacctctgcctcctgggttcaagcagttcttgtgcctcagccttctgggtaggtgggtgctcgccattacactggctaatttttgtatttttagtagagacgggctttcaccatgttggccaggctggtctcgaactcctgacctcaagtgatgtgcccaccttggcctcccaaagtgacgggattacaagccttagccactgtgcccggctcaagtttcaaattttaaatgaaatctcagtggactttttccttttttaaaattgagatataattcacataccataaaattcaccttttcaaagtgtacaactcagtggtttttagtatattcataaggttgtacagtcatcactactatctaattccataacgctttcatggaaaccattaatagtcgctccccttttcctcctccccctagcccctggcaaccactaatctatttgtccctgcggatttgcctattctggacatttcctgtaaatggaattatagtatgtggtctggctgccttcacttagcgtagtggttataaagttgatgcatgttgtaccctaagtacttcatttcttttttccattccttttagttttttttttgttttgttttgagatggagtctcgctctgtcacccagactggagtgcagtggcacaatcttggctcactgcaagctccacctcctgcgttcacaccattctcctgcctcagcctcctgagtagctgggactacaggcgccagccaccacgcctggctaattttttgtatttttagtagaaatggggtttcactgtgttagccaggatggtctcgatctcctgacctcatgatccacccacctcggcctcccaaagttctgggaccacgggcgttagccaccgtgcccagccctgtttaaaatttttattttactcatttatttattttgacacagagtctggcccagtcaccagggctggagtgcagtggcacgaacatggctcactgcaaccttgaccttctgggctcaagctgtccttctgctcagccacccgtgaagctgggaccacaggtgcatgccaccatgcctggctaattttttcatttttttgtagagacaaagtctcacttttgcccaggctcaagtgaactccagggctcaagtgatcctcctttgttggccctgcaaagtgctgggattacaggcatgagccttcacacctggcaccattccttttttacagcattttagaaaaaatttttttcaagtttggaaaaaaaaagttttgtcaggctgttagaattcccgtagcagtagaatgcattatctgcagtgtttgttgagatgcaaaaacaatttcagtacttcagacttttaaataaaaggctctatttagttcatgtgaaaacttttaaagctctgcccttcccccttaaagctaagagactgatatactgattgccagtcttgttttcctcctctgggtttaggggaggggattagggccagactttcattggataaaggtagttgaggctggggttaggctcttttcagaggaaaaatcaagatattaacctgtcaccagaaggaggagggatggatggtgggtgggttaaaacaacagatgtcaggtgtacataactgggatggactttatctgctgcactattggtgcaaaatcctttcctcttatgtgtctcctggtgttcctaaggaaagtataaggaagtcacctgcagtttgtagggaatgagctatttactcatgcatgaactgtgttctctagttaaaaagggattgaaaagaagaacaatatcagagtccctatccaaattatgaactccttgaggtcagagattgtgtcttgtcacaattatacctccagtgtttgatatggaacctggcatacatgagtcattcagtgaatatttgtgagattacttggttttttgccttgttgacttaagaaaactttttattttgaaataatcatagatttgtccgagagattccaaagaaatgtacaatgatatcctatgcatccttcatcctctagcctccctgaatgttcacatcttataccaccatagtacaatataaaagccaagacattgacatttgcacaatccatagaacttaaggtttcaccagtcacacatgcactagtttatgtgtgtgtgtttatgtttgtagctctatgctatgtactatgtgaatacatgtaaccttaactaatgaccacggtgatcaagatgctcaaatatcaccacacactctcttgcattacccctttatggccacctccatttcccggtccttaacccttggaaatttagtctgttctccatctttataattatgttatttcatgattttttccagaaatgaaaccatgaaggtatccccaagattgccttttttttactcagcataatttccctgagttgcatccaagtcgttggatgtacaacatgcaccaacagtccattcctttttactgctgagtagtattccctaaaatggatatagcataatttgttaaaatatttatccattgaaagacatttgggtggtttccaattcttagctactaggaatagagctgctgtgaacatctgtgtacaagttcctgtgtgaaagtaagtcttcatttctttgggataaatgcccaatagtgcgattgctggattgtatggtaagtccattttcaattttgaaagcactgccaaactattttccagaggggatataccattttaaattccaaccattattgtatgagtgatccagtttctccatatccttgccagcaattggtatagtcactatttttctttttagcatttgtggtgggtgtgtagtgatacattgactttttgccccttctcctaccaaacaaatatgttaagttttgaactcagcttcccaactctcagtggcctggtctgtgatttccataggcctctatacttctgacctcctcctacctccatgaccttgacctgacttctctttcttctctccccagcctgggtcccggggtcccctttttacctcagaatcgctttatctcaatcctgccatcttcccaatgcctggagaaagtcacaaaagtgctctccactgctgccaggcctctgatgttacagctcctgggcagtcctttcctttacctcagtgatgtcaccctcccacttctgacaggctctgctccatacagtgaggtcttctctcagagaggaccttaccacctctcaacaagagtgagactgttcagtctgaagcccctcagcatctcctttctccatctctgcctttctgtttcttgcagaagccaactcctcatgtgtgcttatgttcccagagagcctccagctccccagggtagggatttatcagaggagtctattttcagacttcccttcgtctgttctccttttcctcagagtgtccttaatggaacacccacacctctcctctagtactgagtctgttgaatcaggatctctggaggtttgcagggcggagagtctctgtttttatcagtctcctcaaggcctccagtggggagtcagattcagagacggctgcctcagggaccctctgggcccctcttcttcacactacccctcagtagtgttttccccaaattttggagaaccaaattattttgttctggactcactgttttttgtttttttttttgagacggagtttcactttttttgcccaggctggagtgcaatggtgcgatctcggctcactgcaacctctgcctcccaggttcaagcaattctcctgcctcagcctcccaagtagctggaattacaggcacccaccaccacgcctggctcattttgtattttcagtagagatggggtttcaccacgttggccaggctggtctcgaactcctgacctcaggtgatccgcccacctcagcctcccaaagtgctgagattacaggcatgagccactgcgcctggctgactcactggttttaactctgtggttttccatctggttcctgcatttctgcccagctcctttaaatttatattaataattgtaattatcaggttgctttggttttgtagtcttattggctcctgctttgcagtgtcatcagtttcatctttacaaactctgatgctctaactttcttgcataaacagcagcaattgctcttctttccttgcacagaggtaggagtgttctcaatatgaccaccatctggtttcccagcctaggttttcacaaatctcctatacatgatttatgtggcccctgaaatgcctggcgtacaattgctcagaccatgttctttttggattttgttattgggcctcatcttattgcccctgccttagaagtacacctcccaattcagtctttggtcaactgaaatttattctttgtcaaagaccctttcccacagtttattccctgcaacgttttatgaattgttgcctgaactagatgttcggttctaacaatatatattacacatgatgccaagcactgttctgagtcatggtcatataaggtgattgggaaatgatcctcacccccccaccagtgttcccaaccatttttcccttctctagtctcccatagctttctctccccgcactatgattgttttttcattttcagctgtattttaggttttttgttttgttttgttttttgagaaagagtctcattccgtcacccaggctggagtgcagtgctgtgatctctgttcactgtagcctctggctcctggattcaagtgattctcgtgcctcagcctcccgtgtagctgcagttacaggcatgtaccaccacaccggctaatttttgtatttttgatagagatggggtttcatcatgttggtaggctggtcttcaactcctggcctcgagtgatctgcccgcctcggccttccaaagtgctgggattaaaggcatgagccaccatgccccactttattttaggtttttgagaggagataatttgtcaaacccagcactctgcctaccacaaaagttgatgtgcaggatatatttacggaataatttaacatatccctctacctccctgccccagcaacttggaaggtcaatgaacatgtgctgaattaaccccactcttgctgtgtgtgtattcttctctcatacaaccaaaacctaacttttgttaattagggttcagcattagccatttgaatagcagaattctaagttatgtagaacagtagttatccttttttttttctttttgagatagggttttgctctgtcacccaggctgaaatgcagtggtgtgatcatggctcactgcgacctcaaccactgtggcacaatccatcctcccacctcagcctcccgagtagctgggactacaggtatgcactaccacacctggttaatttttaaattttttgtggagacagggtctcactttgttgcccaggttggtcttgaactcctgggctcaagcagtcctcctgcttcagcctcctaaagtgttggaactacaggtatgagtcactgtgcctggccagttatcctttttgtttgtttgttttctgttcacctacagatcactttttagggttgaaaagcccatgtgcagaagactacaacagaaaagatggtaggagtgtgttggttttggagtaactctagtgaggtgatgaatgtaaatttaaaatcttaagtatacgaaacaggttactaatacatttgagaaacaataaaggtgctgcttatttatcttttaccatgtgctagaattgtgctaagtgcttagcatatattagctcatttaaacctagtactaatcctgagaggtatgttcattatattgatgaaggccttgaggatcagaattgtgaaataacctgctaaaatcagagagctaatagatagtgtagccaggattcccatataggtttctttgatcccacaacccatgttttctatgctgttttgcctctctagataaaagcagaaactctcacattgtaaagttaatgcttacctaaaatgtatattttgaaagttattaaacttttactgacccatatgaaaatgcctaagtcagtgagtgagtgaaggaatgaatgagtgagagaaagagtgaatgaaagaatagggtagattggaagtaccatatgtactagtctgtcagatatcctaatacactgaaaatcagatatttgtggtggtatatttgtgggaaaattatcttaaaaggattaaaagtccattaaaaatgcaaacaaatgaagtagtggtaatgtaaaaacattgaggggataatgagcttatatacaagatttttaaaaatggatacttaaaagttcatcagtcagtagagtaataagatgctgttgtagttcattttggcctcacttccttatctccttctttaaaagtccttcctcagtacctcttgagtagtggttatttattcctattacaatgtatttcctttcatttattttatctttttagactttggagactaggtccattttattaagcttcaagagattgaatgaagaacaatcactcccccatttacctacctccatttactttgccatttaatctcttttatttatttttttgaggcatggtcttagcctgttgcccagaatggagtacagtggcgcacaatcagggctcactgcagccgtgacctcctgggctccagtgatcctcctgcctcatcctcccaagtaggtgggaccacaggtgcatgctaccatacctggctgatttttgtattttttgtagagacagagtttcaccatgttgcccaggctggtcttgaactcctgggctccaacagtctgcttgccttggcctcctaaagtgtcgggataacaggcatgagccactgtgcctggactaatttcttttaaaagggtgccattacatcccatgaagtgctgggaagaacactgggggtcttagcactgagaatgtaaatgcttatttgaattctgttttcagtgtaatactcagccttgtactctgcctggtgttcccctgtccattgaacctcttgttgccctctccagagaataaatctctagtcttctgttggggttggggaatggcaactgcccatctgcattgtctgaggaaggggatctgggggtctgtcttagtattgccttcacctgtctacattgccatcaaatcctgagtccttaggggattccacactgtaactcagcttgccaggttaggatttagcttaattcattctgtttttattttctaaaatttgttgctgttttctctgaattcataagaaagttttaaaaggtttgaaagaaaagcaatacagagaagcttaactctaacatgaaaaatttataactaatggcaacattgggaaaaagcaagattggcagcatatgaaagtaagaacattgcacaaatgggcatatttagtcagaattcttaggagatgaactgctaaacatcggtttcagaatcctacataatgatttgtgagtgtgtgtatgcccaaagaacattgaatttgtaggcgaaattttaagtacacagaaaagtgtaaagcatttataaagtgaatacactgtgtaactagcatccaaatcaagtaacaggaggttactagcaacccagaagcccctttctagttcctgacaaccctccaacctctactaagaataactaatgacccaatgttttacactgtagattcattttgttcatttttgaattttgtataaatggaatcatttagtatatgatcttttgctctcatttattttgcccaaatttatgtttgtgagacccattgtgtggtagttgtagttcattctttctcattcctatatagtattccattaagggaatatactaatttagttttttcattttggcagacatttccagtttgggtctgctatgaaaagtactactatgaatattcccatatgtgtcttttggtgcccatgtgaacatatttctgttggttatatacatatttctgttggttatatatgttaaaaattactgggtcacatggtatgtgcatattgagctttaatagatactgccaaacagttttacaaagtggttgtaccaagttttactcctctcagcagggtgtgagatttctagttattccacatctttaccaacatttgatactgtcagtcatttaaatttttttttttccccaagatggagtctcgctctgttacctaggctggagtgcagtggcacgatctcggctcactgcaacctccactttccaggttcaagcgattctcctgcctcagcctcctgagtagctgggactacaggcgcgtgccaccaagcctggttaatcttttgtatttttagtagagacggggttttgccgtgttggccaagctggtcttgatctcctgacttctgatccacccgccttggccacccaaaatgctgagattacagatgtgagccactgcaccaggccagtcatttaaattttagccattctagttagtgtatctgtcactgtggtttgcatttgaattttcatgatgactgtgaggttaagcacctagtcataagtttattgggtatttgtatgtagtcttttgtgagaggcctgattatgaccagcacttttatctagactttcccagccaccagaaccataagatacaaatatgtattgtttaagctatctggtctatgctattttgttacagcagcctgagcttactaaggcagaggggaagtgctattgtaccagtaccaaacataggcctaagagcactgtgtcattgttgtttttttttttttttgagacagagtttcattatgttgcccaggctgagatgcagtggcatgatctgggctcactctaacctccacctttcgggttcaagcaaatctcctgcctcaggctcctgagtagctgggattataggcgcccactgccacacccagctaatttttgtagttttagtaaagatggggtttcaccatgttggctaggctggtcttgaactcctgacctcaagtgatccacccgcctcggcctcccaaagtgctgggattactggtatgagccactgcctctgtctgagcattgtatgttaaaacaacacacgtatatatcttacagttctggtggctggaaaagtcaagataaaggtgccagcagattgccaaattttcagctgcgttttctgccttttttgtactgatttgtagattttcttagagatttatattgagtcctttgaatgtatgtattggaaaaatcttctgtcaatgtggtttatattttcactttcttaatggtgtctttggatgaaccgaaattctttaatgcagtctactttattgatttgcttcacagttcctactttttgagtactgtttaagaattctgtttgcgtcaatatcgtgatattactttatgtaggttttcttctgaaagctttgttttagagtatattgatttttaaaaaatttaaatgcatttgttcacatatcagcctgatctattgaaaaacacttaaacacttaaataagcttaaataataacttttccacaaactatctatgtgatcttcggcaaggcagttagcattttttgttgttgttgtttatttttaaattattacctttcctatggtgctgaagggcagttagcatttgaacttaatttctttaactatagtatgataataataatatccatcttagagtattgttgtaagcatcatgactatctaaatgttagctattattaaaaagtcagctattagcaaagacattttcagagacaattggagatacttagatatagattggatgttagatgacagtaaggaattattaattttgtgttgtgtaggaaaatgtccccattaggaaatgcatcatgaaaaattaagaggtgaagtaaaatgtctcaattcattctttaaaagttcagcaaaaacaataaaatcccaaatatctagataaagcaaacttgcaaaatgtttcaaattattgaattttttgtttgtttgtttgaagtggagtcttactttgtcacccaggctggagtgcagggcactatcttggctcactgcaacgaccgcctcctgggttcaagtgattctcttgcttcagcctcatgagtagctggaattacaggcatacaccaccacacctggctaatttttgtatttttattagagacggggtttcactatgttgaccaggctggtctcgaactcctgaactcaagtgatccacccaccttggcctcccaaactgctgggattacagatgtgaaccaccatgcctagccaaattattgaatttatacattagatatgtagatattcatcatgtgaaattctttcagcttttttggtatgtttgaaattttcataataaaatattcaaggaaagttagtaatgaatctatagcattcctattatttaacattttctccaaagctaaaggtgcagaaggacctaattaaatggatttgagtcacttagcctgttctgcctgggaaaggagattaaaatgaatttaaaataaaatgtgaactatatccctgcatacttgagtgggataaagctgagccataaaaatccaggttttactgggtgtagaaaaaaggagaaggtgaggaaggggtatgagatgtactgagtgctgttaagggtcagatactctgctgggtgctgtaaatatcacctatcattcataaagcaattctacgaggtaagcaatattagaaaagtttgatatgaaaagtttgatagaaaagctttggataacttgactaacacaactagtggatagtggagtgaggatttgtacccagatctgtgtttttgcacacagatctgtttttgcttttcttctttcgttcctactttcctctctccctcccaccgttgtcacttttttcccaccttcactccctttccttcgttcttcctttctttctgacttctttacaaatgtttttattttttatttactttttactttttgagatggagtttcgctcttgttgcccaggctggagtacaatggcgcgatctcaacgcactacaacctctgcctcccaggttcaaggaattcttctgcctcagcctcccgagtagctgggattacaggtgcctgccaccacacctggctaattatttgtgtttttagtagagacggggtttcaccatgttggccaggctggtcttgaactcttgacctcagatgatctacccaccttggcctcccaaagtgctgggattacaggcatgagccaccgcacccggcctggttttttttttttgttttttttttttaatgaatattacgcttttcattgtagaaactctggaaaacacgtttgtattaatttaggttttgctacataataaaccaccccaaacttttttcttttttcctgagacagggtcttggtgtattgcctaggctggggtgcagtggcatgaatgtggctcattacagcttcgacttcctgggctcaagcaatcctcctgcctcagtttcctgagtggctgggaccacaggcacacaccatcatgcctggctattttctttaatttttttttgtagagatggggtctcatcatgttgcctaggctggtctcaaactcctgggctcaagtgatcctcctgccttggcttcccaaagtactgggaatataggtgtgagccattagacccagccagtttttttattttttatttttattattttacactgtgttgagataaccacccccaaaattagtggcttaagacagcatacattcaggtcacaattctgctggcagtaatttaaatgggctcagagggcagttcttccagtctgggccaacctcagctgttgtcattggggctcactcaaacgtatgaggcatcagctgggatgtcaggatcagctcctccatgtggcctcccatcctacagcagactagcttgggcttgttctcttggagaaggagaagaggagccaagagagcaagcagaaatccacaatgctcttgggcctgtgtctggagctggtaaaacagtacttcccctctgcctcagtcagctcaggctgctgtcacagaacatcatagactggatagcataaacaacacacacttatatctcaccattctggtggctgggaaagtcaagataaaggtgctggcagattcagttgctatgaggacccttatcctggcttgcagaaggctgcttgctgtcttctcattgagtcctcacatgggggtagatggggtgtgtgtgagagagagccagagagacagtgagcacatgctctggtgtttcttcttttccttataaggacactaatcccatgatgggggccctacccacataacctcatttaaacgtaatcatcttccaaaggcccccatctccaaatactaccacactgggagttaggccttcaacataggaattttggagggacacagacactccccaacaccctctattgtacaaagcaagtcacaaggccagcccagattcaaggagtgaagaagtgtaccctacctcttggtgagaagaaatataaaataatattgcattgtgatatgggtggcagcaagtgagggtgagtgggatgaatgtttgcagccatttttgcaaacattttttcataacatacaaaaataaacatctactttaagtcatttctaataccattatcaagagctaattattgttaatatgttggtctatgcacaaataggggcagatatgcacgtacagaggcatagttttgtctgtacacatacagaggcagattgcttttaagaatataattttcatttagaatcaaacttatgttctattagtgtattttcccaggtattaaattttccttgaaaacatgtttaccctatgatgcaaaggaaatcaacataaattactatgttccaggcattgtgctaagcactttcactcagttatcttaactaaaaaacaagtttcttgttaatttgcagggttaatttgcatcaaaacaaggaattcatttgttgctacaaagaaaaagcaatgaaaggactttgtgaaaaggttcagagaaaatgataatggttaagacatatcagcaatacccatttttctcttgaaacctgacttgtgaactataacagaaaatacagaagataaatccttgtacctattgcccaccaatccagtctttccattttataggtgaagtcatgtcattatttatgtatttgtttgatttggctgtatttcaggatcatgttgaacatcagttcttattgtatgggtaacataaataagaagcagaaaatgtagagggcaaaggccaaagtttgatcctgggcttgggactgattagttgttgactatgaaaaaaaaatcacttaatttttttgagttcaattttatcatctgtaattacaaaagcttcaatcttcttaaaattggtgtgaagattgactacagcattttatatctgcactgtctgatgtagtagccactggctataagtggctattgagcatttgaaatgtggctagtccaattgagatgtgctgtaagtataaaatacacagtagattttgaacacttaggtggaaaaatatataaaatatcttattgattacatgttgaaatggcaatatattgtacccattgagttaaataaagtgttattaaaattaattcacttgtttattttttaaattcacttgtaaaaatttattttggctgctggaaattaaaatattacacatatggctcacattatatttctgctggacaatgttttgcttaaaaaatgttctctgtacaatatagagtacagcataaatgttagttatagccagaaaaaaagtataggaggtttagttgaatatgtaaggattctaagtggtagcatgatgcttattatttttgctacatttataatgtaagcttttatttaggcatctgaagtttttctttttatgtgttatagagaagtagggatggaagtgctaatccaattatgtgaggaaatcataataacttcagtgtattgagctacagtgatgcaggcattgtgttaagtactgtattaggcaggattcctttgattacaagtgacagagatgcaatctgaattaactaaattgaaaaagggggatcttgtaattgtatgaagcatgggagtgcatctgggtctcctgaatttctagaatataaacactgtttttcctatatacctatcttcctctctcaaatttacttctccctcctcagcagcattgttctctcagatcacttgtctccatatgtcagaaagaatggctccttcaacctctgtgtgtcatctttgctctagggaaggatagactcagacttgctctttctggttttaaatggaaaagtcctgtgaaaaagccatggttgacctagcttggttataggtacctatccctgggctatggcagctctaacccaaccacagaagagaatttcccagaaaaagggaccattcttcttggttgataaaagaataaatgtacactatagctactctagctaatttaatatgtacagccaatcagtagggtagtacctcaatgaacaaatgagaaactgagactcagaaaagttatgtatttcattcaagttcaaatatccaggctggaagtctgggtctgtccatctccaaagcccatgttcttaactaccacactgagaaagttctagtaaatggggtttgtgtcgacttaagttttactgaattatttaataggtctttgctatttttttcctcctatcattgcttcccattgaaagttaagatagattgaggacaagggaactggccccatggtaatactcagtaaatccttatggaattgaaaaccaacaccactatgctctccaatcttgtgaccaaggctataaaggcgttagaaaagcactgctatcattatctttgtaccatgagcttaagacatagttaccactacttggacatttcctttttgtaatttgcagtcttctgccttcttttgaaaacttcttatttttcaccaacacatggttccctatagtctataccacatgggcatagagatttcagaggcaaagatgaaagagtcatactctgttattcataaataaaatatagccaaagggaattttaaaaaatgatgatctgtaagtctttcagaaaaatggtctggagtttgtcagtctcctactcggatcaaaaataaagtcaaagttttcaactaaaataattgcaataggctacaaatctgtttgtctactttaatacagtagaaatggaaagtagaagtaagtgacaactttattggctgaattcatattaagcagtgtgatggaatgctgagaactctgacccggactggtcagaaaaccagtctcctatatgtagctctgtgaccttaatcagtaataagtacaaaggctaactaaccttcattgggtgctaaacagcgtagaacatcttttcataggttgttgactgactctgcccagtggcagtagttattcattcattcgacacatctttttttttttttttttttgagacggagtctagctctgtcactcaggctggagtgcagtggcgcgatcttagctcactgcaacatccaccttctgggttcaagcaattctctgcctcagcctcctgagtagctgggattaaaggcgcacgccaccacgcctggctaattatttgtatttttattagagacggggtttcaccatgttggccaggctggtcttgaactcctgacctcgtgatccacctgcctcggcctccaaaagtgctgggattacaggagtgagccaccacgcccagcctcattcagcacatctttatcaggcatctaccctgtgtcaggcatggagttaggtaccaaatatggttctgctatcatggagcttacagtctggtgtgggaagtcatacatgtaaacaggcaatttcagtgtagcatgttgtaagtgctatgttagaagaagtagactgttctatgggacctcataaaatgatatcaaacgtggttttgagaaattggatggtttcctgggacatgctgtccatttagggatctgaagggcaggctgggattggccaggtgggggatcacaacaaagctctttgtctggacttagaaagaggttgggaagggggaagtggtgaaggctgagggctgagtcttgagggaaattagctggtcctagaatgcagagtccattatgctgactacctttgactgagggtgataggaaacccttgaatagttttaagcaactgagtcacataattagatctgcattttagaaagctgagatgtgaatcaattttttcatttttctgtcttgattttcttatctttaaattgaaagggatagtctaccctttataactctgtccagctttagtagtccatacatttctcctattttggcaaaacttaatgaaactgcctttgcaaaaattataacagtgagaaaattatgacagtgacagatctgacttaatgactccattttgctattctaaccttcaagctgcccttgttcattgttgggcgcaggctgaactaagtttgggaggaacttagtttaaccttgaaacaaagatgataacagcccttcttgcctgaaaccagactgcccatgtaggactaataaattagctgcaagattggaaatgtaggtttaggagtcctgtagccggaggctgcaagttctgaacctcccccattgctccttggggtaacatcattattgtgaaacctaagattggtctgagatgtttttcagaccttgcattctgaggcaccagctggcgccacccagactggtaatctggcacaaccagttctgcagtgcctcccaggaacagaagacagcaagaagaacccactttaaccccctatgattccatctgtgacccaatcaatcagcactccccactccctggctccccctacgtgccaaatcatcctttaaaaaaaaccctagtgtctgaattttccagggagactgaatcgagtaataaaactctgatctcccattcagttggctctgtgtgaattacactctttctctattacaattcccctgtcttgataaattggctcttatctgggcagtgggcaaggtgaactagttggatgattacgttacttccatgctgattttgagatctgttgggcagcaaggcctaagattacaactagtacttgaaaatgaggcaagttttgtgggtctagggtgggtgaaggtgggaggtgaggtgaggacaagaagctgaatgaatgatgtgttgtttttactgggaaaaaaggaaatgggaaggtatgcagtttcctttgacagtctcctgaagagaaactggttaggaaatagctttggcctctcagcaagcaggtggaatggtactttgccacaattctagtacagatgaaatctgatagttacttcccccaaattatgaagtctggaatttgcttaacggtagtagttaggggtctatacatatgaaaaaagactgaccatgactttttttttttaaccgttcaaagtgtttgttaattatttattaagataaacaatttcttagcccacatattcatgtttcacagatagttcaggaacacaggtacagtgacaaacttctatgtaattcaacccaaagaaatactttatgttccaaaatcactttgtactctgagagatattagccttcctcatctcaaattctttaattcaattataatttctgtagaaatctgcatatgccttctttcttggtcaggccacagcaaacttacagagagctgcaaccccagggttataaggaatgctccaacaatatgaaatgacagatgcttggccagaaggccacacatcccaggttacaccaaggcactgagagccatggtagttattgtccttgacagggatgtcagcatcaacactaatgtctttcccggatgatggagaaatggaccaacttgataagtattgatgctgagtgatacatacaaagaagtccattatatgattttccctacttttgaatatgtttgaaaatttccctaatagaaagtaaaaagatagaataataaaataaaaatacccccacttattacctaagttttcttttagcacaaatggaaaataagtcagactctctcatttggccatattgaagctaatagtctcagaaccactgtgtcataacactgacattttgcttaaagctctgtatcacctttaatggcttaaaatattctagactgtattgagatcatgcaagtagatcaaagaaagagaattacacgcaaaggaagggatagctgtactagggagttcactggtaacagagtcaggggtccacagctctgggctgggtctgtcctgaaaggcagtctctggatagcaggatgagatggagtgatcactggctttggagtcagacacaatagactgagctatgttgaaggacaatgacaaataacacaatagatagcattcattgaaccctcactatatgccaggccttatgctaagctctttatgtactttatgttatgcaattttaataactaccctgtttttattagtattttatggatgagaaaacacaggtttagaggttatcaaatttgtccatgaccacatgaacttgtaattcccagtaaatatttttgtaaataaatatctgaaagtgtccaggcacggtggctcatgcctgcaatcccagcactttgggaggccgaggtaggcggatcacctgaggtcaagagtttgagaccagcctggccaacatgctgaaaccccgtctctactaaaaacacaaaagaattagctgggcatggtggtgtgtgcttgtaatcccagccacttgggaggctgaggcaggagaattgcttgaacccgggaggtgagtcaagattgcgccactgcactccagcctgggcaacaagagtgtgaaaactccatctcaaaaaaaaaaaaaaaaaaaagaaaaaaagtctgaaatccagtggttaatggtggtaggttgtaccccagttagtttggatgcacataacagaaaaaagcaaaataacagtggcaaaataataactaagtagtttgtttttctctcacctctaagtaatctagaggtaatcagtctagggttgctagggctctctggagctcggggttcttctattttactgtttcattgtgaatgtcttccaccctcaaggttaactcatggtccaagtacctgctggagctccatattccaactagaagaaagggagaaggattggaaggacataccacctaccctcctttttaaggatccataccagaaattgcacatattatttttgcttataattacaatggctacaacttagtcctatgtatgcatctagtagattacagaaaacttgcatgtggcaggtccaagacatgaaagagactgaaaaatatttatactatgtggccacatgcccagctaaagggcacagaagcatagaagatggagagcaacattgaggatcactagcaatcactgcttagcccacactcagctgcattccagagttttatctctttgggtatggtaatccttctcacgaaacctttcacattcgaatggataaatacatgaaaaacccatgcacttagtttagtgttcagaaaatgctagttccttccctttaattagatgttgtcaagtgagcagcagtgatttggtgctctggagactcagcaccctaagaatttgttccacctgtgtctggggtggtgactgccttctgcatcaccatcttagaggatttgccccaagttctacatcctctatggcccagcaccctgttaggtacaatggggttgcaaaatgaagcatccagattttaaggatcttgaacataaaatcacacataatgggctcagggccaaacatgggactatccaggatttaggaaaactttcacttcagtgttggtttgcagctgactttgggaaactatttaccacataaaaatttccagtgttttcttcaagactgagagaagtcgatcacagaaccagcccacttgagaagctgaagttttcctacttgtaaaatgacagatgaaaaggactgatgcttccatgagttgctcttgaaatggtaatgtaggtgtatctgtgtgtggaaaaacacactcaaagtgccttttcttattttctcacaacaaaaatcaacacaaattaaaggcttctgtgatcaaatgggcacttccccccccacaaacaaacaatcaattctgcagtggacaccagctgcgtgtcctccaattctgaaactatctaccaggagataagtgtcagataccactgacacagtccccaaaactgctcccccaacctaccacctccactttcagacaccagttgcaagtctgggcctctaaaacttctgatcgaccagattcaagtttgggttcccatgatcccctctttgggttgattaatttgctggagcggctcacagaactcagggaaacacgtttattgggttataataaaggatattacaaagatacaaggaaagggatgccaagctgccatgccctctctgggtgcaccatcctccaggaacctccacttagctatctggaaggtccccaaaccctgtcctcttgggccttgtatgaagacttcattgggtaggcatgattgaagcatggacaactgtgttaaaatgtgattcatggacaaaaagtatatgatctaaacccaataaggcctgtttagactctgtttgtcttctctgtgcagcatttcttcccccagggatggggcaggacaccctctgggatgagggtcttatgacccacaatcagataagagtcctgccttggacaggtgaaagtagggaggtagaacatcagagagagagagagagagagggagagaaagagaaagaggttttgtttactatgtcgagggctatgggagttatacaggaactgtggattttatatataatacgtattatatatattatatatataatatataatatatatatatatataaaaaatatatataatacgtattatatatatttattatatattatattatacatttatatattatgttaatatatacattaatatattatatcaatataatatactattatattgatatattaatatataatattatatatattatatattatataatataatatataatatatataatatatatgttacagtataacattgctgtggtttgaatatcccctccacaactcatgttgaaatttaattgccattctgacagtaataggtggtaccattaacaggtgattaggccataaggggtccaccctcatgaatggattaatgccattactatgggagtgcactcttgattaaagggagtttgcctcccccttaacccccttgctgtctcttcctttctttttttttttttttttttttttgagacggagtctcgctctgtcgcccaggccggactgcggactgcagtggcgcaatctcggctcactgcaagctccgcttcccgggttcacgccattctcctgcctcagcctcccgagtagctgggactacaggcgcccgccaccgcgcccggctaattttttgtatttttagtagagacggggtttcaccttgttagccaggatggtctcgatctcctgacctcatgatccacccgcctcggcctcccaaagtgctgggattacaggcgtgagccaccgcgcccggcctgtctcttcctttcttatcctctcttgccttcctgccttctatcatgggatgatgcagcacgaaggccctcaccagatgtaggctccttgatcttggactttctggccccagaaactgtaagaaataaatctctgctctttgtgaattacccagtctcctgtattctattatagcagcacaaaatgaactaaggcaaacgttgttatactatgagcatgtccttgaaaagtcaaggataagttaaatgttagcaaatggaaatgtgttttttaagtgagctcattaaagaaaccagagcgattttttctgtaaactaaagatggcttccaaaataaagttttttggtattttcattcaattagcagatacttactgaacacctattacttggcaggcactgtgctagacctcataaaacatgatgggtgttgtcttcacctgccagagttgctcaaaatacgtgaataataaattgacaaatatattctcagactaatatacggtcaaataataacatttgttacatcggttataaaagttttttaacatattaacatttaagaaatcttggggtatcttaagattgatagtatgtcatactttctttagtagcatatttttcttatgttgtgacttaaaatggatggtttcttagatttgataacatgcagtatttagggctttagtgtttattatgtgcttccatgcgcctcatttgattctctcttcttttttttttttgagacggagtctccctctgtcacccaggctggagtgcagtggcatgatctcggctcactgcaacctctgcctcccaggttcaagtgattctcttgcctcagcctcctgagtagctggagctacaggcacgtggcaccatgcccagctaattttttgtttgtttgtttgtttgttttttagtagagacggggtttcaccatgttggccaggctggtctcgaactcccgacctcaggtgatctgcctgcctcagcctcccaaagtgcaatttccataagttgcccaaaccattttccactgaccacacttagtaaggcaggtcagatctaaggaatgacctaaatgtccttcagctttcactttgatcagtggaattgcctctttaggctgcctcagtggccaaagcatgatcagaaagatggaggtttgaatcctaactgattgttgtgtaaccctgggccagttacttaacctctccaagtctgcctcaaaataagaataaaatctttagatttaaggtaggtaaggcacctggcaaatgataaataatcaatggcagttattttgttactattagagcatcaaggaaacacaggtttcatgatattgggttatcttaaagaaaaaaaaaaagccctacctgggaaatttgtcctattttctggaagacccagaaccccatcaaacaccaagaacagatatccccactcctaagaaacattataggaatagttcagattttcttctgttaaatgtcatccatcagctcacccgattttttccagcagacctcctcttctatcttgtgtgttgctttatatgtcgctcttgacagctgctactatttatgcatgcatttctatagcaaaaccttgattaactgggacacagcaaactgtagcacttaaatgactatggttttcccctatggacatcatttggaggagagagggaagtgacaactaaagttttgagaactgaagagaatcatgtaattccacatcttcgattttactgctgagagaaggagaatggatcaaggccaccctgctgattaagagcagagtcaggagaggattctcggtctattttgctttcttctggactgtggcctaaagatgtgtcttttggcatctctcttgggggtatttctccttaaggttttgccactacactgcaggtctcaaactcaaatgcctgcaagggctaactggtaataggaatgagtggaggaggctgagtattctacattgggaagtagtagtgaactatggtcctcagactggagcctatataccctctgtaaaggcatctaaactaaaatgtttttcattttaagaagtacaggaccgacaaaacacatctgggagtcagagatggcttgatgttccccagttgaagtgccttgcactatgtatatctataggccttattcaataaggagataatctggattatggccctcaggcacattgccaaagtaagtttcaatactgtgcattgatttatgtttgttaaaacagaaaattgaagagacgcattttagaaacctgatcataatatattttgtaacagagagaacagagtagaagctctggcttcatttactgtctgcttagccaaaactctttgtggtccaattagccaaatgaattcagatgtcacagtgtataggacattcataattgggaacactaggacctcttagtaccagagattgtcccataacatagacattcaaaaacatttataatcaggacacacagtgagaaatacatttatatcattactgagcagaaacatacacacactcatacatatcacacaaacccaaaacaatattttaagaaacaatatcttactgcgttccaaactctgatgttttccaacctatttcatttttatgaaaatactttataatttactcatcggctacagcatatagtttaaatcactggactaggtaatgccatgacatttttgtttattcattaattcagtagatatttactcaatatctaatgagagcgaggtgctctttggagtgtcatgggggacacaaacatgaacaaaacatggatttttgccctcaaagagtccaaatccaataggaaatacatacacgtgaatatttaaaaactcagggcaaaacaatcagttcacatttgacaaactgcttttatgttatcatagtcataatgataacaaatctcttaggtaagctgggcagatttaaacttaattttacagatgggaagttgcatttttgaaaaagtgacattttaaaaagaagtggaatgatagtaataatagatagcatatgttaagcacttattatatgttaggaactaatttacttcttactataaccttattatgatggcattactataatcctcactttacagaggagaaaaatgaggcagagaggttaagtaacttgcccaaagtcatagagccaggagtcattggaactaagaatcaatcataggcaacttcaatttttttttttttttttttgagacagagtctcgctttgttggctcactgcaagctccacctcctgggttcaagcgattctcctgcctcagcctcctgagtagctgggactacaggtgcctgccaccacgcctggttatttttttggatttttagtagatacagggtttcaccgtgttagccaggatggtctcaatctcctgacctcgtgatccgcccacctcagcctcccaaagtgccaggaccacaggtgtgagccaccacacctggctggcaacttcaattttaatcaatgtattatattctctggaaatgaaaatcacagatcaaaatcctacataggtcatggcatacataccttgatctcttagcccaccccaaaagtgatgtggcatctgctgtgacaggatagcatttggaatgaggtgtgtatgaaggggatggggtggaatagagcctggttcctcagtattcctcagtgtcactaatcttcatcaagttaataaagcacctgaaggcagcaagagaaaagacaaagggaatgattgctgtccccagaagagggcatcttatcctttgccgttgtctcatgtatgatgtagtatttttgagataagttatgaagtagtcttgagtttggaaaaccaagagttaggctgtaaatgttcaccttgtgtttgaccagtgccacctcccttaagcccaaattctcattcaaagttacaaagacaattttccattaggatatccctggaaaaaataatatttagcctttattgagcttttcccatttgaaaaactaagactgccaggcgctgagcttaaagctgcacccaagacagaccaataatggtaatagagaacaattgttaagtactactctctctctcaatctgtttctctctctctctctctctctctctctctctctctctctctctctctatatatatatatatatatatatgttaggtactaatctaattcttctatataatgatggtactcatattatgcttgttttatagagtagaacagtgagatattcattgataagtatatgaatttgatctttagcacagtaaagaaaattttaatgttgaaattggtgcatatccaaatttaggcccaagccctagtttttaggctgttgtaaattaacctagttattgtattttcctgccttaatatgcttcttatatcttcaattttataggattattaatagttatcctgattgactttatttatattaagtataaagataaaattcttatagcccattcagatttttctttacacttgcaaactccagagatagatattgaaaaatacaaaggcatatgtctcatctataatttctttcagcaatatgtctgcaagttgagcaaaaataactgaaagtgctctttttgaaaataataattttcacttttcaaaaatgatcctgtatttatttatttattttttgagacagggtctcagtctgtcactgaggctggttctaaattctattaatccaatgattatagtccagcatttgtcagggcacatgatgaacactaggtatttactgtccctgtgtgtctgtaatgaattaaaagaaaaagtacagagaaagattatttaagatgttatgggaaaagatttactagacttcacagaattattactttagtcaagtaactaaaataattcaatctgacagatttggaaaattgaaagtataaaaatttgttttaaaatttttattgcagtttttcctgccaccattcagattgtttgatcttgttataaatgagcattaactctgatttgcaattcaggtcacaccatacctcatcaaagaatgcagttgggaaagcaactggccaggaagtttaggtttccccagaaggactggaaggatttagaaaacatttctttggacttcttctggttgatgctcttcctacaagaatctgtgtttgggtgatccttgtacaggaaaatgtctcttagtccaatttattttatgtagaactgtgtagagctagagcttcccggaaactttctgagacccaaatcatctggactgaagtctcttagatgctattgtttgattttgtgtccttaggtgattgatataaggacagcaagagaaaaccatgtaagatgagaagaaagcaaagctggctttgtgtatgggctcaagtacattttacatgcacgtacttttttcctgttttggtgaggaaactctgtcaaatgactcttgacgggcgcctcacttagtccctccaagttttagtagagaaaatgataatttttaaccaagacttacttgatcttgacctaagatgatgagaatgagcaatccttctgaaatcttattattttaggtgaaaataaacattcgataattacattttaagacttaccagagtttatccaggttttgttcagatccagaacttatacaatgtcggagtcttcttttaagaatacacgatgacagatacaaaattaggtacacagcttaattaacttcatgataaattctcttctgattatgagttactgctttctttggccagaattgtgaaagaaaaataaggcgtgaggctagaggatggggaaaaaaaatccttgtctatcttgcttcccaagcaggccttcaagctagctaactgaaacagtcttttctccaggtcctaaggtaaatggtggcggatctgaaaatgcgtcggacttaaccttgcccttctccccagtttattcgctcaacaaagagttctaaacagtcacatctgctctctaggcagaacggacgctgcctcctagtattagaatacccaactctttgatatctcccttagggatcatccctattctggagaatgtgcaaaatattgctcttcctttatatcctagcatagatatattctggcacttaacatgcattctttttctgttgaattgagttacaagtcagttctctaggacggttaccgtcctggtggctttggcggaatcttccggtgaaaataggctaagttgcatgaaatgggtgtgtctggattttaccacaagacccctggtcctcaaagcttcgcaggccgagatacctcgcccctttcttctctgtcacacgcgtgcgaacacaccctcccaacccacgtcgtagtagtcccctcccccgaccaccccgccccgtttcccttcaacccccctcctcacgaacctcccctcccttcctacctccctttccttccctccccgcgggccagcggctttggcgctgccctgctgcgcggcggggcgacgcggcgacacctataggattgcttccgggcactcctcagccaggaggtgctggcctggggcccggagctcggcagggccgggcggctccgcggcgttggcccagaggacgcgcgcccccgcccggccgcgtctccttccctccctccctcctcccggcgccccgagccgagctcagcccagggcggcggcttcgcctcgcccggcgaagcttctctccggtggccgctccttcttttccctcctctttgcgtcatgtcgggcacttaatttttttttttttttaattccttcttcagccctttccaccttccatctcccttttcgcttcccaggttgattattttctcttttctccgggcttgcccatgagcctcctcgggagctaccggaaaaagaccagcaacgatggttatgaatctttgcagctggtggacagtaacggggacttaagtgcgggaagcggcggggttggcggcaagcagagagtgaacgccggggcagcggcgcggagtcccgcccgacagcctccggaccgcgccagcaccatggacagctcaggtagcgctgcccgaggggagtgcagcgctgagccccgcgcggcctccggagcctcccagtcgcccggcccgaggcccccccgtggtcccccagccccggtttgcgagagagccgggctggaggcgaaggcttctaataccacctgggtgtcgagtctctaatttctctcatccagggagctacgaaacgttagatcagtcctgaggcccagagactgtagcgagctcctcctaatctctctagactgctgaatacggcagctgggggcggggagggggagggaaggaggaggggaggggtggagaagagaggggagcgggtggggcgaagaacggcttgggaggagggctgggagaggcagctgctttcactgcccagctggatgagggggagaggtgaaggagcatgtgcgttgattgtttttgcagcatgcagacggtatttattccaattgttattcttgcaatgctgatgctatttgcaattctgtaaagctctgccacatcttaactcagccgtctgctagggttaatgttacctttctcctgcagtttttaacctgggatctagagctcttttacacagcttttactgtttgcacaatgaaatttatttcatgtgttggctttgatcttgtttgtccttttgcttgagtgtacagatttcataaacctttacatgtagggacaaggaaattcctctaaactttgtatcggggcttgcaactgtcttttataaaaggtttggcaagttagagtcctctcttggaactgctgttggcatttgcgatttcaatagcaaaacagtcatttaatatatccatgttggactaggagtattattatagctatttgcttacttctgcagggaaccaggttcggagaattgtttacagagatatttataattgaagtcctcagtggttggttctacactggtaactttaatactggacaactgaggattccagaggaaagattcatatggggtcgtttgaacagtaatgaaatcaaactgaatttaaatgccctgctttgcaaacaaatgcttgtttattttaattgtgtaatggctgtccttgggctattattttctattttccttgtcccaaagtgggatgaaatattgtccacagatgctcaaatgtcctgggctgaaaacaaattctactcattgaagctcttattgaagttaaccaagatattgatgggacattctcttagaccattttaaataaaactaaaatgatccccaagggattgatggtttcaggactgtttttttttttttttttttttttttttgaggcggagtctcactctgttgcccgggctggagtgcagggatgcgaactcggcggactgcaaactccgtttcccgggttcaagcgattctcctgcctcagcctcctgagtagctgggattacaggcacctgtcaccatgcccggctaatttttgtacttttagtagagacggggttttgccatgttggccgggctggtcttgaactcctgacctcaggtgatctgcctgcctcggcctcccaaagtgctgggattacaggcatgagccaccgcgcccaggcaggacttttttattgatgttgtatgtggttattcaatgtatgttttttcaaatctgtgatatatcaaagtgtaatccatcttttgactggatgtaatctcctttaaatcttaaaaagattcatgttctctgaatgatgccaccataataatgtttacatgtagtgagcatgtaaacaattgaaatgaaaacaaacatattccaaatgagtgtgaaggagcctcacttcaggaaaatgaaagaaatatgaaatacatatgttttcctttttcatagggattattattttaagagttgaaattggtttttgaaatatgttacattgtagaataagttcaacatacattttctgagcccagctatgtgccaagcactgtgagggaacacagtagtgaatgagatccttctggcctctaggggactctcagtgggggcagtaactataacacagagcagcctatggtaagtcctggatttttgaggattgtctttttcactaaatcagacttttttaataggtggagagaagaataatggattgctttaataatctgttgtgatgggaaagtgtttcattaagaatattgttatctctaaagtgctattgccaggagttgattcttaaacttgatcaaagtggtgttgtgtgaagaggctgcagggattccttttctcctccccttatccatcattcactcctatattttattaggggaatattgtggctttgttgtagaagtacagggtatcttacaatgattttgatgcatattttcaactgagaatgatttgtttggtttgaatgaaggattggactctgagagtaggattcttttactagtacaactatatgtcttgcctaattatagttctttcttctaagatcctcaaagtgtggcctgtgcagtgtaaatatatccatttgtttagtatatctaattaagttcatggatcatttctaaagtggcagtaatctgcccatttattcaactgattgtactgtgacatgctggataggatcagtggtttatgggacttttgctctgatagaaatattaatgagtggaaaaaatatgttgacatctcgctacatgatttaaagcttagtcttaataataccttaaacttgtaagactgtttataatagaacacttggacaattctcttatttcatttccccagaattttattaaataggttggggaagcagcatgtgtctgtgcttggagacttgggatcaaacctctgcattattgttactcgctgaaaaacctagtaacctttttcttttcttttctagacagatagctctgtcacccaggctggagtgcagtggtgcgatctcagctcattgcaacctccacctcccgggttcagacaattcttgtgtttcagcccctcaagtagctgggattacaggcgtgcaccaccacacccggctaatttttgtatttttagtagagacgggctcttgccatgttggccaggctggtctcggactcctggtctcaagtgatctgcccgccttgacatcccaaagtgctgtgattacagggtcttgctccattgcccaggctggagtgcagtggtgtgatcatggctcactgcagtctggacctcctgggctcaaatgaccctcctgcctcagcctcttgagtagctgggactacaggtatgaaccaccatgcctggctaattttttttttttttttctttgtagagatggggttttttgccatgttgcccaggctggtctcaaactcctgggctcaagcgatctgaccacctcggcctccctcccaaagtgctcggattacagacatgaaccaccatgcttggcctgttcccatttataaaagtggaatcataagagctgttcttaccacagagctttagttgaggctgaaaacaatataaaaatacatttgcagtttttctttactttgtatcttgccctttcaatttatcatatgaagaaacttattctcagaggtggtaggagacctatcaaaggtagaatagataatgacagccagacttaggtcttctgactcaaaggtttgagtttttccccattgaactaaacttttgggtagacacaatatcaactgattgttgaaatggaaacatttttatctactttgatttcccccctgtttttagataaaagaggggtacatgttcagaggaatgtaatggctttctaagtcaacagcctctcaagtggtagataccagagcagtctcctagccagatgtgacttccagagctctctgccttccctggctcactttctcttcattcaaattattctctagaaaaggttgtcatttaaaggtcatcctgtcatatctcaaaggcactgcactatcccaatgccgaaaaccccctatttctcttgtgtgcaccccacttttcagggaaagtagaaccacaaaagtagaactttcaatattgagctgctaaagtgttccaatattgggcttaatttaccaagttcataatgacaaactgaaaaagagtagtccaattaaaatctggaaacagatattaatactttttaaagaataagtataatgataggtaaggatttctcttttgattctcactttttaggctttgttctatatatttaaatatatagaaattcacatatataaataaacaaaatattgtatatattaaaaaaaaagaataaggataatgaacaatgctaaaataccatgtagtgtgagtctggttggaaacaaaaattacctttaacaaattctattttagttagtgtttaaacacagcatccacattttgaaccaggtttcaacattatgagatacgtgtttggataattgtatacttcatggaagtataataaacatatatgtactaataatcctttcttaagaatatctgcccattgaagggtcttgtaggttggaggcaaagtttatttatataacttattttttattttttttttattttttgagacggagtctcactctgttgcccaggctggagtgcagtggtgtgatcccggctcactgcaacctcttcctcctagttcaagcaattcccctgcctcagcctcctgagtaactgggattacaggcacccaccaccagccaggctaatttttgtacttttagaaaagacggagtttcgccatgttggccaggttggtcttggactcctgacctcaggtgatccgcctgcctcagcctcccaaagtgctgggattacaggcgtgagccactgtgcccagccaatttatataacttatttaatgtgtggttatagtttggatgtttctggataatcgtttaaagatgcaccagttactggattacagaataagatacgtcaatttaagtttcaaatttcaaatgcttggagactgccagatttcatagatttggaaggggaatccctggaaccaaatctcggaaagttggccaggtagccaatggtggacactttctgtgatggagctttagctactggggcagtgtctttgaactgttctcatcagtgcagagttctttttatttgggcaaaatcagcctttctgttctctagatacaaattatgtctaatccttctttcacatggtagcccttagacaacagatttttgagaacaggtactaattctctcttagtcttaattttcctcttttctaggccaatcaaacctaagttccacatgcttttttctctatataaaatgatttccatataattatcctaagctttgagaataatgttttttttttttattattttgcacaacaggggttttcaccaatttttattataaaaggttaaaaaagaattaaagattacagaaaggaataaaatgagaaaagttaagtattctctcccctccctgatcatttaggtccttgcctcagagataacttctactaaaagtttctggaaggactttcaacgtacaacatgagtgtgtgtaaatatatatgctttacacatatatgtatatgtatgtgtataccattagaattataataaaatacaaattcaaagtttaaccatgttcatatatgtacattgttcaataatgcttaatgacaaaaatagctacaatttaattattataattcagggattatgctaaacactgcatatggtgtcacatttaaccctcataagaatcctataaggtaaatgatagtaacggtcatcttatagttgaataaactaaggcacagagaggttaagttgcgtgaggttacacaggctctacttattctatattgagtaaaatgccatagagaaatgcccatacgattgcaaatgaagaatttagtggtgaatttttttatttgcttctttctctgaggcaaggaaaaataggagtgattgagagaaccaaaatgagttcagttgttttttaatcccatgaaagtacaaatatgttttctttacttaaatataaagaatttaaaaacactggaaatgaaaacagcaaaaacagcattgaataaagctgattaagacttgatacggcactgagagaacaatacaattgatgaagcattatatatttttggaaaaatatattgcaaatgaaaatggatccccactgctcttaggataaaatccaaggtattcttaacaggacatcagaagccctttgtggcacctgtgaaagctggcccaacaaaacttgttgtcgctccactggtagatcccctccccagcctgcacctccatctttatgtttttgcatacactgttctctcaactcaggccaacttatcccatagacccctggacacccacttttccaggttatctcctattcattcttcagggtttagctcagatattccttaatcgcaggctgcatgcaatggtcattctccatgctcctcagcagcctttacttccgtatcacagctctcatcacattgagttgtgacatgctgcctggcctgtctctccctctagtctgtaagtaaagttcagagcaaggctgggtcttatttgcctttgtagtcttgtcattgcttggcatttattaggagcctgataaatacttgttggatgcacaaaagcatgaatggattttgaatttttaaaagggcatttataatgaaatatgcccatccaaatctaaaaataagcatacagctaggttttaacagaaatgaggccaggtttgagagaaatgtaactgttggtcgaaagctagaccaattcagtaatgagcattttttcatatgtaaagacactggaagtgaaagaaagatggttaatatatagcctagatccttaacagttttctaatatagacatgtcaagaaagaattagcttaccaaaagattgtgctttttcgaccaacaaatacaatctactgtatgattcatcataaaggtcacttttttttttttagccaaaaaaggaaactcaaaatgtatacaatttttttaatgaactgacaatagatgactttcatctatagatctgtgtatttcttaatcggtgtcattaagttttaatcttagccattttcaggtttaatattaaaagttctttgtatcatctttggccgtctgcagttgtatataagctttgtgctaacttaactgcttttttaaatctgtgctcaccatcttgaactccttttggaaaaaagctatgtttgagatggatgaagaatgctggagtttagattgtgcatttccttgttgcgaaaggtgtaactctgaaaaaactaaattacagttattgtatattaaacagctattcctgaaatttacttggaagcttttgaaagagtagctcagtatctgaggagaagttcttcacggtccaagaaattaggaagttccataacatgtgccaagggatctggcaatttctactacctttagttgctttatcccacatgtcacaggccatagtctagatgcaaaaaatatctttttatttcaataacacatcagaacatagttttaaaagtgctagagatagaaactttaaattaaaattaaaatgcgtgtagtattaacagcgcaaatgtcaccaccaaggaagcaaccagatgagccaatgcctcctgtgcagtgttaagtttgcatgtgcagaaaattactgttgttgtattgtggtgtagtactctacctggtagctggcaagtgtgtttggcatacattgtaagccacttcctaattttagaagtgttatgctgtgaaaaaagtgcaattagaattggagatatttgacaaaagtcagggtgaataaatagtataataatagttatataaagtgcaataggggtgcagaagaaggagccataattttaaccaggaagactaaagaaggccacagtggaagttgatatttgagccagaaatctgtaggaaaagaaagaaagaaaacccgttttgggctttgggctaatgcacagtggcatcatagtgcatggtatgtttagagaattgcatttaggcttgaagctggagcccagatgggtgggaggtgctatagcagatggtgctgggaagataagacccaggtcagggtgagtctgcttgaggaggttggactttattctgcaggcagtgggaggccagtgaagatttggagatggggtgaggtagggctgacttatctactaggcacagtgtctagaaaccacaataattttagggtccacaaaaatgtttacattttaattgcctttaaaaatcagaataaaataaataagtataacaataatgaattcatctttattcaaatgcagtcattaaaatatatgtttttttttctgttaatagaggaataggtccatgaaggtaaaaatgcctacggcctacaaaagtcatactgcagccccagggaaaagagggcaaaatgtgaatcctggagataatttacagctgtgtgaaggatgaatcccaccggtggttcctaactgtgatctggctgcatcagatgtacctgagtaaacacagattccctactatgcagccgtaaaaaggaatgagatcatgacctttgcagggacatggatggagctggaagctgttatcctcagcaaactaatgcaggaacagaaaaccaaacactgcatgttctcacttataagcgggagctgaagatgagaacacatggacacatggcagggaacaacacacactggagcttgtcagggcatgggtggggcgggggaaggagagcatcaggaagaatagctaatggatgctgggctgaatacctaggtgatgggttggtctgtgcagcaaaccatcatggcacacgtttatctatgtaacaaacatgctgcacatgtacaccagaacttaaaataaaagttgaaggaaaaaaaggaaaagaaaacacagattcctgggccccaagcatgtttgatttaggaggaaggggaggggtgtgttggaagacagagcatgccagtggaggaccaggagaacaatcaaattgcagtttagctgatgacctgagaaacaacgaaggccctagccagggcagtgtcagtgagactgggaaaaagtcagcctggggaagcattgcacaggtgaatgacagactgacaaccaaccaatggtggggtctgagatacaggagatacctggatggcagcaggagagaaggtagtatttctagtctcagccagaagtggaaaatgtgatcaactgtttttctctgctgcaagttcaccatgaacatacttgtggaagggctgagaatactgttagcttggcacaagctttcaccaggctttcagctttttggtaggctgcccattaggctgtgcagatgcccaggggagtgctgtggaggggtgtgtggtagaagcaggccctgtgtttgcctggaggaagagtgagataatgggtagaaatgctagaactgaagctctgtggctctgggctgagtccaggcctaaggcccgaggccagtacggtgtctgtatcgggtggccccttctcactgggagagccctagactctggttccttgcttgttgatggaggcacagcaagaataatcaaacacctgagaaacttggaagatgattattgaaaccagaattttttttcagaattctctggaaaaaataaaaaaaacaaaaaacaaaaaacaaaaaaaccaaaacaaccctgaccccagaaattctcagggactttcttgtaccagcatttggccacttgagcattgcggcaaaaatcttagcagataatagtcttcatttttccctgatccttattcttattttagtttcttcctcttctgcagtctttccctctcttctcttcttttgtccttctctttctctttcccacccatcttcaacttccttatccctctctcttctcctttgcctcttgtactcatctgctcccctcttctcttttctcctccccttctctctagtcagtgagtcagcatgcctgggagatgtggagccccatgccatatgcagatgactgtagttttgggatatgtgtacgcatgtgacttagttctcagtctgctgcatgtggctcaaaaggtgtgaagactggtgtcactttccaatttaggcaattgcatctggcttacctaaaatttcacttgctgcttcaatcagcaaagtgtttcttccatactgtgacttggtgatgagaggtttcatgagctgcaataccagaggcagttgcatttcattcagatgaaggaatgaattttactaatccacagcccgagagtataagataatagctcaccatttcttcccctccatctctcttactttacctctgtaggaaagcagatctttctcttcttcttccctgttgctgaagcctagatatattgctctattttcaacccttccatgtctaaattagttgaggctgttgagcagtgggagtactagggaattatgagtcaggaactccaaatctaagctctgactttgtcatttacaagctgtgaccttgggcaagtcattcaaatgagaaaaatcatactgaccctgcctttttcataggcacagtggaatgtgagaatgtaaatgaatgcatttgcagttgatactcttcattcattcattgcataaatgtctcctggctgcctactatgtgctgccactcttctagccatgggggatacagtagacgataagatagataagaccttggcacttatgagtttgattatagtgcatgagcagtgaacaaagatatatggttctatggtatgctaaattctatggagggctagagcaagcagagaatagctcaggatggtagtaggatggggagacctatcttccaggggctggtcaggaaaggcccttctgaggagataatgtttgagctgacacctgaagaaacagaaacaagcaggaaaaagaaagagcagagtgtagggcatttcaagttctaggtacagcaaatgcaaagacctggagaagggggatagctttgtagaaagaagtgtgtacctgatataactggtgcttagtgaactaggagggcatggccacaaatgaggtttgagttgtgtttttaagagactgtttggctgcttgcatagagagagtttgaggtggcttcctaggtattccacattgtaggcaggatttctacatcatagacaaggtcagcaattatactgttcaacactaagtatcagtcttttaaaaatttatttatttatttgagacagggtcttgctctgttgcccaagctggctggaatgcagtggtgcaatcatagctcactgctgcctcgaattcctgggctcaagcaaggctcctgcctcagctttccaagtagctaggactacaggcatgcaccccaccatgcagggctaatttttaaattttttgtagaccagagtcttgctatgttgcccaggacggtcttgagacctcaaggaatcctcctgcctttggcctcccaatatacagggattacagatgtgaaccaccacacccagcctaaatttaattttttaaagacgatttttttttaagagaagttttatgttcacagcaaaattgagaggaaggtacaaagatttcccatatatcccctgcccctacacaggcatcgcctctcccattatcaacatcccccaccagcaacatactttgttatgctctatcatatgcagaacttacaatgatccagtgaagtaggtggtattaacaaaatgtttttgagagaaggttcaattaggttcaatgagcttatacacagtgaaactagcagcagaactcaggtcttctgccatattgggacatgagagagattttcagaagaggaattgacatcttgggcaccctgtagccaagatatatcagctactttaggaagagacaagctggagggataggacaggaaaagttgggttttaattgccagggaaattggtttagattgccttgaaagtatagcaggattttactgtaattattggtcttaaaattcagccattaaaatctcctaacaggagataggagcctggctttgtctctgaatgtgccaggagagaactgtctccattatgcctctcattggcacacagaggctgggaaactttcacacactgtctcgttttgtgagcatttgcagttgtaacggaagacagctctattttatatcttgctttgttttcaagccattgcatgaaagccaggcctcttggctcttaaaaattaacccccccaaacctattttagtttatagcagtgatacaggttaatgaaaagaatatttaaaacaattcagagagtagtataaaaatgaaaataaaaatccatttttttctatcttctcacacagacatggattcttgcatattcacatatacatacatccaatcatatatataatgtacacttgaattcctggaatccatctatacatgctattatataatgtgatgttttatttaacattgtcatagataactttctatattagtacctaaagatgtaccttattttctctaacgattgttttaaattccactgtccaaattcctctattgatagggggtaaatatctttgagcatatatttttatatattgtatatgcagtatacctgtgggaaaaattcctagaagtggaattactaagagaaagaacatatgcagttcacattatgatagatcctgcattgttgctaagaaccttgcactaaattaagtttctaacagtatatgagactacctgttttcccacattcttgtcaaagctgagtattgacaaacttcttaatctttggtagactcatacatgagaaatgatgataatggtttacttgaaactggcattaaaggttgatatttctgtgaattatttttgttttcagaaattaatttgaatagcttttcattaggtaggcaatacatattcaaggcaaaacaatttggaaaatccagaaaacacaaagaaaaaataaaaataactgataaacttgtttttcatgaataaccattgttaacatttaggatatacctttttgtctaatgcatgaagtgtgaatgagaaaattttattacagcagtggggaaagcattggagttggagccagtggttgttctagattcaagtttttaacattgctgactagctttgtgaccttgggcaagtcatttaaatcctctgagcctcagtttcctcctttgtaaaacagataatgccttttaatatgatttggctttgtgtcctcactcaaatctcatctcgaattgtaatccccatttgtcggaggaggggcctggtgggagatgattgaatcatgggggcagctttctcccttgctgttctcatgatagtgagtgagaactgatggttttaaaatgtggacttcctttctcactttctctttctcctgccaccatgtaagacgtgtcttgcttcccctttgccttctgccatgattgtaagtttcccgaggcctcctagtcatgcttcctgttaagcctgtagaactgtgagtcagttaaacttcttttcttcataaattacccaggctcaggtagttccttatagcgatgtgaaactagattaatacaccttccttcctttgttttcttttcttttttctgaagcaggttcttaccctgtcacccaggctggagtgcagtgacatgatcaaagccccctgcaaccttcacctcctggggtcaagcagtcttcccacctcagcctccaagtagctgggattacaagactgcgacaccatgcccagctaatttttaaattttagagatgaggttctactatgttgcccaggttggtctcaacctcctgggctcaaatgagcctcctgccttggcctcccaaagtgctgggattacagacattattgttcaggcacagtgagccaccatgcccagccaataatgcctttcttatcagattgttaggaagaacaaatggaataaggaatagaaaactgctcactgtattccttgccctatagtggataacttgataagtgttggctgtgctgaagttcaagtgaagtaaggcagtgttgagaatatttttcttatcctgaggtttcttcaaggtggagaattttctctcttcagtttacaaggcactgagccttgtctttgttatatccattttgggattgttcataagttttttctctttctttattttgtttttatttttttgagacagggtctcactctgtcacccaggcaggagtgcaaatagcacgatctcaactcactgcagcctctacttcccaagctcaagcgatcctcctgccttaccctccctcatagctgggactgcaggtgcacgccactgtgcctagctaagttttttttgtttgttttgttttgttttttttttaagatggagtcttgccctgttgcccaggctggagtgcagtggtgtgatctccgctcactgcaacctccacctcccgggttcaagcaattctctgcctcagcctcctgagtagctgggattataggcacccaccaccatggttggctaatttttgtatttttagtagagacggggtttcaccatcttggccaggcatgtctcaaactcctgaggtcaagcaatgctcccacctcagcctcctaaagtgctgggattacaggcgtgagccactgcacccagcctctttttcttgttttcccagtgtttgtttaaaagctagttcatgtaaggcagtggttgtcaatgaagggctatttcatgccctcctcctgggacatttggtaatgtctggagacatttttagttgacacaatagtggggggaactgttactggtctctagtgtgtagaggccagggtgttgccaaacatgctacagtgtacaaaacagctcctcacaacaaagaactttcctgcccaaaatgtcaatagtgccgaggtagggaaaccctgatatagggaatatattgaatgtgaattgaagttaatgaacctggtgaagtatgcatctatggactcatcaagctaatggtacttagtggtcggccctataaattgaactataccctacaggaatttctaccaggctgcaggaggttctttgcttttcaggaagatggcgtggaaagcatctaagttataaaagggctgtttggctagggctatcacctggaggcagccgaggtcctagaagtttgggtctcagttttcatggaatacaaggtagacttcctttgttccttcaagcatctattcattcagcaaacactgttaagtgaccagaaggccaagtactgtgctgtgtcagataaaaaaggaaaagaaacaaaagctaagatatttcctcttaaaggagcttagaagacagtatattattgtggttaagaactcagatgtggatctctgctgcgtgggctcaaagcctggctttgccacttctagtttatgtgatttagcctcttgctttaggatggagttgagaatatctaggtcatatgattgtgtgatgattaaaatgttgatgaacacagtgtttaggagagtgtctagctcaatgaaatttgcattcttgtttttgttatttgtactgtactactcctactgctaaggaatcttggagccttatggattttctagtttagtagtttcaagtttgattagtactggattccttttctcaatatagccttagccagactctgagtatataaaatacagatatgcatagcttaatatagccatacgttctgagaaacgcatctttgggcaattttgttgtgcaaacatcatagagtgtgcttacacaaacctgcatggtatagcctgctatgcacttaggctgtaggctatagcctattgctcccaggctacaagcctgtatagcatgttactgtactgaatactgtaggcaattataacacaatggtaagtatatatcaaaacatatctaaatatagaaaaggtaatgcactgcactaagatgttatgatggctgcaacatcactaggtgataggagtttttcagctgttattatcctatgggatgactgtcatatattcaatgtcattcacctaaacatcattatgtgcacatgactgtatatgagaacagcagctcttgttaaagtaagggtgggagtctggacactgctttctgggaccactcccctctctccccacaacagtgttgtctgggagagaacctgggactgtgtagaaccctgtttgccacccagcaatctcatccagtccactcactttgagtgaggaaactgaggcctagagagaggaagtgatttaaaaggaggctaaagcaagacaggagtagctctaatgtacatgtgccaaacacagacagggtgctctatgagggagttcagagaaggtagagatgggccccttcttggttaggttgaggtcttgaaggatgggtaggatttgaacattccagataaagttggaaagagtattttcacaggaagaaatagaatgataaagggatggaggaaaaagcattgtagtctttacccgtttcttagtcagtctatttaaaacatattacttaaaaaccaaaggaaggtagttgtcataaagtcacagagtaattcctggggcccaggggcagtggagccagcccatatgcacctggtaccccagaagtgagcacctcctggaagccccctctccagtgccccatagttcttgtttcccttcctgtgcatttgctctgcccttcactctctctgaagaccagctttattgtcttctctgtgtacatggcttcctcagaggtcctgaatttctatgccactgcttaaagcaaccagttctcaacgatcatctgtctctgaatcccaaattctaaattccaggaggaaagaatccaattacacatataggtattatttgtgtgcgtctcatccaaaattttagacagactagggcatgtgaggaacctgtcttatgttgagatggatggcaaagccctactcaaagatgaaaaaggaggaaaactggccctcaagttgctcttttaccagcagtagaaagaagggtctatataactataacaaagtatgagatagacagtacaggtaaaaagtaagagggttgatgaaggcttcttgaatggggacattagtgctggctttgcagtgtaggcaagatttcttggtggagagggagatgggggaggacattccaaactagaagcttggaagaactttgcatgtttgagtaacagtgagcagttgagtacctgcatatgccagtacttcattcattcgtttagacaggaaatatttactgaggacctagtaaggaggaggatataattatggataaagaaacaaacttaaaatagttacacggcttccccaaggtcatagagaatatgaatatgaaccatatctatcatgtttcaaactcttgttttctccatttatactttttctacttgattctacaaggtcaaaagtgacttagagcaaggttggtggctcatgctttttttctgttttaaatagagaacttttgaaattgtgcattgtccttacatcctaaagtgagaataggccataatttccataactataaaatgatttatgtgtgggtgtatgtttgttttaggggaattgtttggtcaggtgatttctaccatccattctaactcaacatttcatgtctgggtaatattggcaaccagtttgatttaatttattacataattatttataatagaaaaacacttgaaactgcctaaaatgtcccaaaatagaggattggtttagaaaattatgatatgcccatatagtattaccaaatagaatattaagatatgcctatgtagtattaccaaatagaaaactaagatatgcctatatagtattaccaactcaaaaaagttgcttttttttaatggtagagatggtgtctcaccatgttgcccagtctggttgtgaactcctgggcacaagcaattctcccacctcagcctctcaaagtgttgggattagaggcgtgagccaccatgcccagctcaataaatttttaatatgatgggaagatattcaaaatataaaattagtagtataaacaagaaacagtctttatacattgaattaaactacataaacacatacacacatatatttgtatttacataggaaaattattgtaaagatgtgtattagtctaaaaatgaaggaactatcaaaatattacaaaacaatatttgggtagtagatatcagtaattaacaaattttaaatgtgttttgctaaaatctcaatgatgaatttatatttcataactacagttttatgtaactatgttctttatctgcatctacttttgtaactgaaatttttattgaaataattatagattcacatgcagttgtgagaaacagtacagagagatagctgtaaactttgcccatttctcccagtggtatattttgcaaaactctagtgtaatatcacagccaggatgttgacattgattcgttccacctcagattcccctagtttcttgtactcatttgcatgtgtactcatgtgtgtatgttaagttccacactattttctcaactatgtgggttcctgaatcacagtcaaggtaccaaacagttccaacaccataaggaacccccatgttgccatccacacctgccactattcttttaaaaaagtacttgaccccaatgggtcgggcatttattttattttgcttttgcatctgaggccataatggtggaaccttagagttgggaaggacttagcagtcttcttggttcctcaatatagaagttttagaggaggagtgggaggcattttataattctccaccctcctccaaacacatcatcagcttgagctgtcttcccaacctttgccccgtaacacctttgccttggtaatgcaggtctcaagttagatatcatgtccactggaaactcttgtctgaccttctaagtctgggtcaggtgcttctttgtgccctgattatgttctgtattttcctctttgtggcacttttctcattttataattgctcatagataataaataaatagtgaatgggtagatggaggtctggatgagagtcctttcccagtgtctgatgatcctgcaatggccgcttctccttcctttcccaccttgtgagtggcttttgatcctgcctgcacttcggccacagcacttatgtggcaagcccttgtttatgttgattgtgcccaattccagccttctacctgctgatggttccaccaggatgactaacttcatcttctgagcttgtcacatttttcttttccttcatttataaagtcagtaagatgattactttaagtagctatgagcctatattgtgctatgtgcttgatatatattataatagcttcagctctgttcaaaagaggaaatggctacagctgacccagagagcatctggggataaaatggggatagtaaaacataacttgaagtatattttattaaaatatgtataggaatatttttaatattttattcaatataataaatataaatattgtatttatacagtattcccactcatgatcctgaacaacttattattcctgaataagttgttcaggatcgtgtagccagattagtggcagaaatagattcaaatccaaaactgtctgttacaaagttcaccttttttgctctgtctgcaagaaggaactgcatctctagggatctgttttaatttcctgattcttccaagacttagaacatcctctagggacctgtatccaagtctagttcttgactgaaccctctagttaggtagctctggactttggaaggcagccattctattgctggacaagaaacattgctgggatgtttattgatgttcagtggaaatctgcccttcactctctcagttctgtatctaggtggcttgtagttctttcccttggtgcaacatacattcttttgaatttataggtccctcatgctgtacctaaaagggatttttctgggtttacctctttattttacagatgaagaaacttgagtccaaagagagaagccctgtttaacttactgcccttgagttacttgaaacctaatcttgcctttctggcttacctttctctttctagctctttcagtctttcctcatgagatgggttttctttactttttattaccctagtcattctccttatggacactctccagctggcctgtgtgcctcctatttttgaagctgacctcaatattccaaattcgggttgattgcatggagttcaacagaggatgtttaattctgcaaacaatgatgagatgccactatgtaccaggaacatgttgcaatcctctaccatattctgcctttctttttctttgtgcacattgtctacaatatttatgaggctagaggtttggttgcatatgtcacaaaggccatcataacagtggcttaagcagatgaaagtctatttcttttttttttgttttgttttgttttttgagacggagtctttctctgttgcccaggctggagtacagtggcccaatttcggctcaccgcaagctccgcctcctgggttcaagccattctcctgcctcagcctcccaagtagctgggactacaggcgccgccaccatgcccagctaattttgtgtatttttagtagagatagggtttcaccgtgttagccaggatggtctcaatctcctgacctcgtgatccgccagtctcggcctcccaaagtgttgggattacaggcgtgtgccaccgcgcccagccttgaaggcttatttcttgctcatataaaagtcggatctggaatggatgttgtataaagtagctagggtgccaagctgcttctatcatgctgcttttttaatctttagggtattactctcttcttcgtcatctaagatggccaactaaacattagttttccagccaatgtgaaggcgagggaagggcttactttttctctctgagaaacagcgtgtaagttgcagtcttaattccactctcatcccattggccagaacttaatcacatggtcgtacctggctgaaggaaagcctgggaaatgtagtcttttattctggtagtccatgcgacgagctaaaaatattcctaagaagaacaaggaggggagaatggattttggttggcaaatagcagtctctaccatacccctccttcttcagctccagggaaacaagtcctggttggttctttgtagccattggcttcccaggtttatgaagttccatttctaggaaaagtggcaaagcaggatctcccagaaattctcaggattctgtgaaagactgaaaatcagaatctttggtgtggaggtcacaatgataaaaatacctgccatttatttggggcttactatttgtttgctaggcatatgttaacatgcattctcttatttaattttcagatgaatcctagggggcaggtatgataactaattctaaatttacaaaccaagttttccaaagaggtgaaacaacttcccaaggttgtacagcgattacagggtgaagctgccacctgtttatcttagtgcactggagcctgaggtcattgcccactcagtttgatgccagacagaccagagttgctcattaacacttcataaagccctctcatgttcctcataataaccagacatttctaattataacttgagcagcaaatgttgtttaagataggttatgagccccaagttgaagggatggcttttataccatgtttgctgagtatgagctcaggtcagacaaaatattgggtgaccaaattggcaaagaccattgtccctgtattccattttgctgtcagcagtgctcttggtttattttcttttccatgaggaaactgaggcacagagctatcacaggacttattccatgtggtaatgttgggatttgctccacattgttatgataccaagctggaaatcttcattctcctgctgccacatgttccttactctgggggggcctggacttctatttcctcatgtcctggagtctctcagcatgtcctgggacctgggacctggttccaggcctgagtttgccagctttgctgtgtctggttagagatcacaggcttttctggactcttttttgcttatagctttgctttttaaattttttttctcctataaatatggcagatggattacgaatacaaatgttaacgtggggcactcaatgaagaaaggatgtctctatggttaactctcttttccagctccaaatcaggatatgtagactacaggaaggggcaatggaaaccttgatatttaagaataacaaacgtttggtgaattgggtggtggggcacctttctggaggatgaaaaggaatcaattatgcaaagagccaggtagaggtttcttagcaggatgatagcaaaagcaaatgccttaagtgcagaaatgaaaaagaggcaagaaataaactaatatcatgtttgagtcttacatattttggaatttatttattacggaaggagagacagaagctcattatcagcaatgactcccctcccctgaatcaacggcaatttttggacaggcctcaataatgctaggagtaagtgctgtcacgcttgtcaaatatactttgcttaggtatgtttggaaaaatgatcagtgtccttggtgaagtgttattctcttttgcttcattaaactcaccttaggaagtggttaaattgacagtgttttttttgttttgttttgtttccagaattctcttgacatctcccagaggctttgaacataagataccagtgctgtttttgatattagcagtggtttataaaaatatttaagtgactctttcctcttaacgtacattcaaatacttagagggttagaaattagaagattatatcagaatttcaaacctgggatttatagaaaattggagggtgctcaaagatgttctgttggcagaggagttgagttgctctgagaacaatggtggattcttttatttacagtggttacagactcacagatgtgcttccactggccacaatccatccatcactagcagatttgtacattgttccagtttgggcatttgggttctcaatctaatgttaattcacctgctcatattaagaattttaacataccaagaaatgtttttttaaaagcaaacaaaaacaacactatcccccaaattaatagtgggaattgaatagtacattttggccttattactcatctgggctcagcagagatctttggatatgcttccaataacaataaaaataacagcttggtgaaataaatggactcgtaggtggagaaccgaagtactgagaggagttttatcttctgattgcattgctctttggcattgaccatggataaaaaccatcactgctttatttttagtttataaagtacttctatggataacattttacttcagctttacaactgccttgtaaactgggtataattgtcttcatttcacagctgaggagactgaggcttaaaggggttaagtgagttgcccaaggtcacagcatagcaagcaggtgacagcatcgggattccaacccgtatgttattatataaattgtcttaaatcctgaaaacatgatagctttaaaaccttaaaaagcatcagtgccatctttagaacaatgacttaggatttttttttcctccatggatattgctttaaatgtttgaggaaataactgcaaattttgtttcatcctaaccctaataatgctctctacaatgtccctcagctcagaattccttgtgactatttgaagcttcagtctttaatattgccttgtgtttgattatatcatgtcaaaggcagagcctggaaaatcattattaaggatttgtaggttgtttgcatgaccttttaaagtaaaaaggatagatatgaatagaaataaataaaattattttgcaaagtaaccataaggcttcagccatgtctgtatctaatttattcactataaaaagttctactgaagatacattttgacttagatcacataattgagaaaaagatggcaaatttatcgttaggttaatgtaactatcccttctttggagaggatgataacaaaactgtcaaaagaaaaagatgcccagatgagattatacttgcaaaattttgtaggcagatacacaaactgcaagtataacatgtaaccatgtttgacaggagaagtaggagaacatgggttacaaaatccttaagcttgacagcctctggcaaggtggtgaataatgtgaggtcttttaaaatggctttcttgagataaagcacagaatgtaatgcatgcaactttcagaattgttgctggagacagcaaaaatactcttgagacagtgcaggctactgaggaaaatacatgcggtgatccagaagaaagtgagagcacgggctgttgggagaactgcaaagagtttccctgggactggggcaaagatgggtgaaggaggaatgcaggaggtgagaatgggaaggaaagcagttcccaggttattcaaggctttgtaaaccatgtaaccctgtgcctctaaaaatttctatgaacgggagtgataagataaaatttgtattttaacaacatgcctcatccctctggagaggattggaggggtccaaagctgttaggaggctagagatggaaatggcctgaactgagtaagatactaagtaaggagtagtgggtgtgtagaaaggtgggttggatttgggttttgcctataggaacagtgggaggaaacaaggtgactctcagatttctttgtatctacccattcttactccataacctcccatgctgtaaaatgatggtggtggtaacaatgactataaaatttgaaggcctgttatattataggtgtgaaacttctcatcacctacaagataaaattcaagtcttaaaggggcatgcaagcattccataatgtgcttgttgcctatcctaccaccctttggtaaacaccctgtgcagtattgctgaccaatttatagttcagaatctaaggtcagaattaacaatatgtattgagccagatactctggtacaaataacagtgatcaaatcaactatgtctgtctttttttttttttttctttaaacagagtctcactctgtcgccaggctggagtgcagtggcacgatcttggctcactgcaacctccacctcgcgggttcaagatattctcctgcctcagccttccgagtagctgggactacaggcgcacaccacccacgcccagctaatttttttttttttgtatttttagtaagacggggtttcaccacgttagccatgatggtcttgatctcctgactttgtgatccgcctgccttgacctcccaaagtgctgcgattacaggcatgagccaccaggcccagcctatgtctgtccttttatggagcttcttttgtagtagatagagacagaaaaaataaaaaccctcaagataaaaagagccgtgaagaaaaaagagtagactaaggagagttcatatagggtgatcaggaaagcatctctgaaaaagaaacatttaaggagaaacctataggaagtgaggagggaagccgcgtggctcactgggggaatagtggaattgtaagtgcaaaggccctgagggaagtacatgttgaatagacgagtagtgtggctgcagcaaagacgcagggagaaaggtaggagataaggcaagaggggtacagaggcctgttcctatagagccttgtaggccattgcgcgagctttgatttttattctaagtgagatgggaaatgattggaaaattttcagcagaagagtaacatttgccttatttcttaaaagaacacctttgtttctctttatgaaccacaccttagggaggcaagggtggaggcagagacagcagtgaagaagatattgcaataattcagatgagaagtgattggcttagaccaggttggtggcactataggcagtgagaaaaggttgattatacctctttgtatgtggtaatataaaaatattatatacatttgtattagtctgttctcatgctactaataaagacatatccaaggctgggtaatttattaaaggaaagaggtttaattgactcacagttcagcatggctagggaggctgcaggaaacttacaatcatggcagaaggggaagcaaacatatccttcttcatgcagcagcagcaaggagaagtgccaagcaaaaggaggaaaagtcccctatgaaactattatatcttgtgagaactcaccactatcacgagaacaggagcatgggggtaactgcccccatgattcagttacctcccactgggtccctcccacaacacatggggattatcggaaccacagttcaagatgagatttgggtggggacacagccaaaccatgtcaacattgtacatgatatatgtagtacctaaatatatatagttttctaaattcaaatatacaaaaaagtaaaaaggggaaacacaggtagaaaccagaaacccatgtccccattactcagcttcgacaattatccactaatgagcaatttcattttttctaaagctgttcttgcccctctggattattgtgaagtagatcccagccataatgtcattaaatatttgaatatgcctctaacatgtaagggcctagctgggcatgatagcatgaacttgtagtcctagttacaggggagactgaggcttggagtgagaacctgctcaatcagtcaatcagtcaataaagggctccttttaaaaaacactgtcacaacattctcatctcatccagaatcttaatagtccttactatcctcaaatatccagcctgttcagattttcctgattcttttaagtgggaatcttatttttgcctttttatagtttgtttgaaccaggatccaaataatgtttatgcattgaagttgcttggttttaaagtttcttctctatgtctcttttgttcctgtgtaatttttgttgttgttgttgttgttgggaaaaaaaaccaggccatttgtactgtagattttccccaagtctagattttgctgactgcatccctgtggtgtcacttaacctgttcctttgtcctctgtgttcccggtagattaaaggcttgatcagacttacattcagattagctttttgcaagactatctcgtaggtcgtgttttgtatttccatcggggatatacaatgtgtggttgtttctgttttttgtcatcactgtctagtgccattgttttattaggggctgcaaatgtaattcttactttttttttttgtttgctggactatttctatgaggaaaaactcttcctcatcagatatttggttatcctggagtaaagttcatatagcaaacaaaggaaaaaggcttgattcttaccctttatttaccagttttcaaaaataaaaagtaggtcccctatccttctctgagggtgacttatgaagcttctctctttctctttttctcttcattttattattatgaactcatatttttaaacacacattcatgtttcagtccactgcagttattacagttggccctctggggattccacatctgtggattcaaccaaccctgaatcaaaaatatttggaaaaacaccaagacaacaacaacaaaaaagtacagaataaaacaatgatttgtctagcatttacattgcaatgtaataggtattatacataatctagagatgatttaaagtatatgggaggatgtgtgtaggttatatgcaaatactacacgattttatataaggacttgagcatccttggattttggtatccttgaagggccctggatccaatctctcgagtatatagagggacatcagtattcttactaatgactaaatggaccatctttggtcatgggagcctctgaagctagctcctgaatgcttctaacacactcaagtagtctttgatgctttccttgctttctggtatcaccagatgttccaggctcatcttgtatgttttctgccccaatcttagaatcagccactttttcaaagggctctagttccttttagagggaaatggtgcataaagacctctggtgtgaggggtgctcactgctcctgagctggtttttgtgtctaggccttctcagtggacagagctaggagcaaattttttaaaaggtaaaatacattatggattcacaattatatttctttctcccatgccaaaattctggttctcagttgcaccagtgtaattacttatttgctttgtgccacaatacacagccacagaatcacaataccaacactatcaccaaaacaggttaaggtagttttgttttttgtttttcttttggtggtggtgggggtactggttgtatatattttgctttaagacagttactttgtatcttaaagttacttgaggtagtttctctctgtgtggttatatcatcaatttcatactaagctgggttggtttggctcattttgctatcacttttgaggggttgctttaaaatttatgtttgtaattatatagaatatttacatagtttcaaattcaaatctttaaagcaggttgtattcaaagaaacagcttctgtccctgccccctctaccctgttccctccctcacaggtaactctctttcaagttttgggtttatcttttcactttgtaaatatgtgtgtgtatctatccactctctcttggataagtgggagctctatacatatcttaaatttcggataaaatttggaggtagtacagacactattttctgaaagattggatgtgaggtatgagaatagagttgaagctaatgcccaggtatgacatgattgactgatagaattgaaccacctggccccgagtgcccttctttccatgtggcctggttagcctcattcatctttgcaaactccagctttctttgctctcaggtgctctcctctgtgctccattgatgccctctgcgtcacattatccttcccatatggtcttatatactgttttcatttgtgtttggctgtcagtagactgtgagcagcttgatgtcagacattatgctttcttattctgttttcccaccacctatcacagaacctttcacacagtagaagctcaatagatacctgagtaaataaataggccaggtgtaatgttgggttcttaagaaaaaaaaaatgaggtggatgttgttgtcctatttcacagatgaaggaacaggcactgaaaggtttaagctgcttatctaaagaaacagctaataaattgctggagtacgaacccgaatcttgtctgatgccaaggccacacagctccaactctgtgttctcattcagcagtggcatgtgagactgtccacaattagcctattaattgtgtgacctctgcaagaaagtgagcctctatgtctatttctacatctacgaatgcaagatagtaatggcgtgtacattatagggctgtaaagcatttagaataatgcctcatacatagtagggactcaaatcttagctgattttaggtacaattgttatttttagtagcggaatattagaatactactactaccactacatacaaagccctgtgcttggcactgtgtatggagtcttctttgactcaccccatcttgccttctaggagtttgcaggcaatgtgcatatgcttaaagatttcaagaagggcaactggggagtggtcagtcaacaggcagtcacttgagattagtgccaaatgcagggaaagaggaaagaaggcacttgcaggtggccaacttgttagataatagtccctcacccctgggcttctggggcaaaaataaaaaacagaagccatggtggagatttgaatgtttctgttccaccaatgtcaccattagtggcagccaaatacttcgactccttgtccagtttggtgatactcctaacagtccttgccttgtagcattaataagttgcacaaatcacaatttaatactcacattatatagactctatgagtcatggggtcacccagagttcatgggaccttggagagcagcaaattccacctccacattttatagaaagagactttgtccagagaaggaaagccatatgtttaagggcacactggtatttggaacttgaactctgttggttaaccttatgggtcagatcatgcagattcccaaatgcctggacccttgcctgggagggagtggactctcaatatgcaagagtgctgagagacgagggatgatggctccactgttgtgctggccacattgtatttggtgagtccaggctcctgctcttatcagaacagcaatggtagctgctggaggaagagctggcctccctcaggatgtagccatttctgctgcctgattcatattgggcaaggtcttctttgggcccttccatagctatagccatctatgtgctattggcgattgcactgagacctctactctgtcaaaaagaggtaaggaagaatgtgatagtgaaagggcatgagatttagagccacacagatctggtttgtgttctgaccccagtgtttcttagaggtgtgacttttatccagtcatttaacttcactggaaacctcaatttcctcctcaataaaatgggcatgataatatccaccacagcaggttgttgtaatgattaagtgtgataatctatatgaagcatttggcagaaaaaaagtgtccaaagaatggtagcttctctgcctctctccccgactctgcctgaccttcatttagggctgtctgtcctctgtcacacagtgtggcatagggctgtggctgtgttattacactttctatttatcagaagctactgaggggtgttgaaagatgtagactttaggctccactctcagagattctgatttgaaagaaatctgaaaatttgcattttttaaaacaggcaccccaggctattctgatgcgtagcctggtacctaggctgacatttaaccttgggaacctcttgcaccactgtttgccagaccccttagcttgggcgggttatgcaacctctctgagcctcatttctgcacctactaactgggactgatagcctgtttagcaaggtccttttcagggtgaaatgaaacagtgtgtgtgaagcatcttgcatgaacctagcacacagcgggagcctggtgaagatgtgaagaccgataccagacaccaaagggctgcattgccttcttccaatctataagctagccgtggccctagttccttctttggaaaccaaacccttgcaatgtatctgtccacctattcttaccattctgtggattttgcagaggacacattgttcatgatggaaagccacctgcttgcctgtcacctgcattttttggagaccctttttatggttattagtgcctgtctttgaaatttcagcacctgtgagctctgattgtgttacctgggatctaaaaaggcagcagaggagaacagatgctgctaatgacttatcagctcttttgtccatagtcttctcaaagaaaaaaggctgtgaccctgggtttgtcagcactgatatgctttcacaccacaaagggacttgacaatgggcaggtttccaagtctgtagagtggttctttgggggaagatggaaagcatatttacagtttggttcttcgggctcatgctctttctccaccttctgtgctctgctgccactacccctggaatgctggtgcatgtggcttttgaacatgagagtcaaagacagcagctattgaccctaaaggctgtgtgtgcctgtggggtgggtgggactgggcagcaagaagaggctgaattaggaaagagcatcttgagccactgtcatcatccctttgtgggaccaagtccgtatgagggaccgcgatcatagctggattgtagttttccactcctgcctgttcaagccttagaaactagttttcattaatttcattgctatgcaatgaatgcatagcagttttccactcctgggtatctgttcttgcaaatatccttagattaatgcagagcagacatcaggccaaggtctgccttttttgttctccagcagtgcttttgggtttgactgtttccttttatgttttaagcttttaacaaatataataggaggcagcaaaatgttgtcagtggaacacaggctttggagtgagacagacctagggaagagcctggctgtatgacctaaatttttgtgttgggtcctgctgtgggctgaatatttgtgtcccctcctttcccagattcgtatgctgaaacctaatccttaatgtggtaatatttggaggtagggcctttgggaggtgattaggttgtgatggcagagccatcgtgaacgagattagtgcctttataaaagagggccccagagaacttgcttgtctctttcaccatgggaggatacagggagaagatggccttctacgaataaagaagtgggccctcactaggtaccaaatctgcaggcaccttgatcttggactttctcgtctccagaactgtgaggaatacatttctgttcttaataagccactcaatttatagtaccttgttacagcagcccaaatggtctaagacaagttctcactttgctcctctgtaaaaaggggataatcaaacttacctggcaacataattgtgaagattaagtaagataatggacataaagcttgtagtctagttcccagggatcaaagggtgcttaataagtgatggctattgctgttatcatcttgctgcacttcaatgcaattgaaattggtttaaaagtgaatagaaacggttggtttcttgatggattcaattcagttcaattaagtgtccttttttagatggcttaccctggtaagtgtcatgctgaatacttgatacagatagaaattaagcactctcttctcgctaagctcttcttgtgcattctcaattttgcgttgcagctttcaacaaaagcatcccctcacccttcccagtgattctaaatttctttatctactcatttgaaggttagtttgactttcaagccttttgagatctgagcatcattcacctttgcggtctcacctctcacccctctctaatataccacccagttctgtgaggaaacaccataatatcttggctctagtatgtaccattgccactgcctgatacacattcctctccatttcagagtcttcctccttcctcctgtgtagtggagacgcaatactcatctgtcagtgttggatgaggatttatgcatataatttttttgtccgaagagcagatggaaccacacagaccagactgcaggaaagagaagagataaacagtagactaccttacctgtggtttcactttccaaggtttcagttatctgctgccaactgcagtctgaaagtgttatgaaaattccagaaataatccattacgttttaaattgtgtgccattctgagtagtgtgatgaaatcttgcaccgtcttgcttggtcctgcctgggatatgcatcatccctttgtccagtgttatgttactgcatattagtcacttagtagttgtgtaagtgatgagattgactatcttggttattgcagtgcttgtgttcaagtgacccttattttacttcataatggccccaaatcacaagagtagtgatgccagcaacttggatatgccagagaaaagctgcagggtgctccctttaagtgaaaaggcaaaagttcctgacttaataaaaaaaaaggaaaaaaaaatattccgaggttgtatagatctatggtaagagtgaatcttttatctgtgaaattgtgaagaaggaaaaagggaattcacgctagttgtgccattacatctcagacggcaaatgttatggccacagtgtgtaagtgctgtattaagatggaaaaggcttcagtttgtgagtggaagacatgaacagaaacgtgttccaattgatggcagttgggtttggtattatctgtggtttcagacatcgactgcaggtcttggactgtatcctctatggaaaagaggggactactgtactagcacctgcattggccagatgctaagtagaaacagaagctgccttgaacttagggaggccctgggtgtacagtgatttttctatgccatttgtggtgccatttctgcagcccaccagggtgcagcctgcagaaggaaagtcacacagctctttcctccctccaggggtccttacaataatgaatgatggcaaagagtcaaagataggatgatgataatgcctactttttattgagcacttcttgtagatacatgcacatgtgtgtatttcattcttaacaagtattattgcaaaactgaggttcagagaggttgcatcacacccttgagcatgaagaagacagggagggtggctgtaataatagggacagtcctccaaagcatgacatccgactcttttgatggttgggcagctagtgtgccagggaaataattatctgtctccttagcaacccccaatatttggcttagttgtcattgatgcatttcagttatcttcatgtcgttaaagaaataggtctcaggaaatttaatccagctagcagtgctatgcctagaattcaattaactccatgatttgcaattaatgagccctcatgccaagattgaggtcatagcattaatcttacttttattttaggatttccactgtcatgatttacagcgaaatccagccaatcttgtcaggattattggagcataattaagccagaaaggcaggcagaacagctagttaacatgggatccagggagggaccacatacctttgcttggtaagcctacctcaagcaggatggggctacatatgaggatttccatctaaggactgtttcccagatgcctgatctgtatacatttcaaatccccatccaatctccaaagaaaatatttccgagtcccagttggtgagcccttgtgagttatgttgttgttaattcaatgctaccacatccacctccacctcaagttgccatttactaagttgtaaatgtaacagacagtgagtgggcttttacagatgatggatttaatatctgtgatgattctatgaggaaggtatcataggccttctctctgtataaggttatacagcaagtaagtggcctttccactgaactgatggaaggttgtggcagttcctagctgcagaccatttttgtgcttctctccctttcgtgtgtgtgtgtgtgtgtgtgtgtgtgtgtgtgtgtgtattttgcccattaggatctcctccactttcccatatagaaataagaaggtaggcatgcataggcaaatattgtttatgattgccttctaggtgacaaatactcatccatcattatctcatttaatcatcgtatacatgggaggaggatattatctacctccattttacagttgagaaaactgaggcttagagagatttactagtttgcctgctgttacacagatagcaaggaaggagagtcagtgttgtgaatccaggtatgcttgtttgcaaatcctaggttcttttaatcacaacacgctagtactaaataaatgctttttctcttttcctggttctccaggagtggttattattgagtcgagaatttttgggaaaagtaacacgtggagagtcaatttttgagtggaaggagtctgaagagagggtaggaaccaacctcctactacccaccaggtaagggtgtacttttggcctttgggatttagcccatgtcttctgtatgtagagtgcagatccaggttggctaccatgtctggccaaccaagcacagaagccaacccctcccattgactttacttttgctcagtgtttggtttttccacaagggagggtagtggccagatgtttatgagaaggtctccataagccaagtccacaccagaagctgaccccacagctagcggtagctttctttgccctagagaccagtgaaacagaggagtagcaggttctctttgtacttaggtagcagattttcctccaaatgcttgctgtgggttttttgggttttctcctaggattcaccttcagactgtatctgcctccctgtgtagttagcatttagaagtgtcctcactgggtttgcttagcctcattgaacatttttatgcctggcatggcttactagagactacctattggaagtgcctactaatacaattttctgataatttagatgctgaaggacttccttgaaattttcttcggctggcttgggatggaatacttgcttttgaaatatgccctaaagagtgtgctatccctggggaaatccacttgtctcaggcaatattaatctgctctgcgaacagcttgttggaaatttgctgataatccattttttttttgtcattccatatctcagtgtgagagagtaagagaatttggtaaaagttcttactttttagcttgaccttctgaggtctgaggagcactcaccttcccagtctcatcttccatccctctctaacacaccctcaagttccctgaggaaacaacattatatcctggttccagtatgtattatagttggtgccttaggaaaattactttctttttcagagacccctgccccacccttcctcatctgcttaggggagactgtaatactcatctttcagtgctgggtaagcctagcatgttccctagtatgcttataatcagagctcagttatgatcctttcacttttatgtctgtccttgacatgatgttctcttaacctttgcttgctctccaacattattttgtactaaataatggactaaaatgcccttcagcccatttccatccaaactgcaattcaggcatcacctctgccataagccatcctctttccaacaaccttcaacaccacccccgctccaccacccctgcctgccacacacacacagacatacacaggctggaaataagctcctcagaatgcttatctactttatatgcaactttataatacttcttggtgtgtctaaacagtagaaaatcaactaataattataatgcagcactgtgagagatatgagagaaaaaatactaatgactcagaagactacatttcattgctaagtggaaatatggcaggtccaaatctatacacagtatcatctttatttctatgtatgtggacacacaacacaaaatgtgtatatgtacgtatacacaaaaacagaactaagaatgtaaggatatatagtctccaaaatgttaacagtggtacccttgtttattttcttctctatcttaatttcatcttctttggtttcagtagacctcaggggtagagaagtgagttaatcatactgctttgcagtctttatacggcacaaggccccgtctggttttattgtagattttcttttttttttttacttcatcagcctcaattccatcctcctcacccagccatttggtttctttctgatgctctttatgtatgtccttaagtgtgcccaaattttccacattctttatgtcttctatattatagatatatatgatattattgtgtaatgcaacgtattttaatgtataaaatataacaaaatataggtaatgtttatatttatatctgaatgaaaccttttttcataaattagaaactggaattcatgtctctgctttttacctcttttccccgttgtctcccctcccctcaacactgcaatcacacacacatgcatgtgcacacacacacacgtgcacacatacacacacacacaaaaatgaagattttcttgaccagtcgtacttccagttccaaaatctcaggattccttgttgcatatattggttgactccctcccttgagctctctgatatatggttttgtaagaagtttttaacatgatttttctcaagtaattgagctcctagtttttagcatagtacagcagagtttgaacagagaatgaccaatggcaatgcagacagccttattggactaaggatggcattttctggtgattcgtatgtttggcttatcttccccagtctaggctctattcaagcatatggcaaaagggacacaccatttgcagttagagcaatatttgtttccttgccctgccagctactagcaagctaagtgacttgagccttaatttcatcattatgccttaaagcacttcaatgaatcttaattgacacccagaaatacgcattttttaaccttttgaaatttgtcgataattattttatgccccagcatatgtaaacacttgataagagggtatattcttcagttgttggttgcagtattctataaatgtcaattagggcaatgtagtattgttgttcaaatgttttcttcccataccaatgttttgtctacttgttcttaaaaagtctgcatttgtgattgtgggtttgtccctttatgtctacttttctgttcatttttgcttcatatacttagaagctgtgcatacatttagaatgatatggaataattgaccctttattattatgaaacattattccttaactctgtaatattgtcttgaaattaatttgtatcatgttaatataggcctacctgctttcttttgcttactgtatgattaatattttctcatcctttgctattaacctatctgtaactttgtaattaaagtacatctcttgtagacagcatataatttgtgttttttttatgcagtctgataatctctgtcttttagtgatagtatctggcctatttagatttattataattattaatataattgggattaagtctactctcgttatttgtttctaactattgcttctgtttttagtttctctattcttttcagctttgttaggattaagcatatattttaatatgaaattttaattcttctggctttttggctatatatatgtggtacgtatatttgtgtgtgtgcatgtgtgtatatatataaatatatataaatatatatgtaaatatataaatatatatgtaaatatatataagtatatgtgaatacatataaatatatgtaaatgcatatataaaaatatatatgtaaatacatatataaaaatatatatgtaaatatatatataaataaatatgtaaatatatatatataaatatatatgtaaatatatatatttggtatgtggtttctccagagattgcaatatttattcttcacttatcactgtatacataaaataaaataagagaatgttatagcagtaaaatttcacttaccttccacccatcttttgtgctattttgtcatatatttttcatctgtgtaataacaccacaatacaatgttgttatttttgcttgcaacagtgatctttcagatgcattaagagaagaaaaccataatcttttatattcacccagacatttaccatttctggtacacttcatcctttcctacagatctgagttttcatctggtaacattgcccttaaggctgaagaactccttttagcatttcttataatgcaggtcaattagcaacacattttcttgtgtttttaatataaaattttgttttgaaaggattttttgctgtctataaagttcttggttgatcatttttttctatcagcactctaaaaaaattcatttcattattttttgacctccattgtttctgatgaatgttagccattattgacatttttgttccgctatatgtaatgtatctttttctctatcagctactaagattttctttttctttttctcattggcagtcttattctgatgtgtctaaggtgattctttgtatatttatcctgttttgggtttgctgagttacttggatctgcagcaatagtttttaaccagggacaatgttggttctctaggaaacgtttggcaatgtttggaggtatttttggttgtctttgcttagagttcagataggagaggatattacttgaaattagttaatagaggctagggatgctgccaaaagttctacaatgtccacgacaggcccccacaacaaagaattatccaatttacaattcaatagtgctaagtgccgaggttgagacatttgcattttgagttgaatttttttccaccaaatattggaaataaaatagtttttctgctccattttcttcctgcgtcccttcttagactctgcttacatgatggtaaactgcttgcatgatgttgtctcacaggtcactgagactctgtttttaatttctgtcgacctgccttcaagttcataacattttcttttgcagtttcgaatctcctgttaagatcatttagcaaaattttcatttcagatattatactttttaattctgctattttcttcttctttttaaaaatattctttgctggtagctcattagactacctctttgtttaagcctttgaacatattaataagcttaaagttcttgtctactaattctaatatctgaagcatttcaggttctatttctatttactgctcttttattgttcaatttttactgctcctttatatctgtagttttattgtatgataaacattgtgatgatactttgttggaagtctggattaccattttctttgaaaacatgttaaattttattctggaagacagttaaattaccgacatatccttctggtcattaggcttgattttattctttgttaaaatgggtctattgtggttttcaacttagtcctaggaatgcagcctttattccaaggtgtagtccttattcctagtgtgatgtggcctttctgatacagaaacactgaatatccagctaaatgcctgagatgctcagcaagagctttccattttggctatgctagagctccaacatatgccagcatttataacctctggtatatagtgctggtttagttctcaaccctgcatcaggcagtctctgctgggccttgtgaagtcttactctctatatttacagcccagacctcagctaaggactcagggtgaatttccatgcagtcttttccctcctatccctccagcacccctaatccctatgtccacactgtgcctctccctattttcttttatattgtcccacatattcctgcttcttagtagtttttgtattttgatccctgccttcacagctcaggggaccactattctacttgggctctagatcattttatggtaataggaaagtgcttccaggcaaaagctggagcaattgtgaggctcatcttgtgtggtttctttctttcaaagatctcagtccttcttagactgttgtttaatgcctaaaaaacagatgttttatataacttatctagtttatcacaggagctcaagtccaataccattatcatggttggaagtggaaatcaggaatatgcattttaagtaaagaccccagataattctgaaactgatggttgtgggttcatattttagaactgctgatgtaaattatttaaagtagatataaagtattcaaagtagccccagctttctgaggaattgtcagaggatctctactctccaggaggtctaggtattttatattttgcaaaggataaaggacttttatctgaaatgtttcttggtgtgagatccctttgagtgtggtgtatgtgtatgcgtatatttgctacagtgctgagttgtactctgtgttttcaccatcttgtgtatagacaatgcacaatagaataccacaccatagcagaatcattgatcaaatatactgcaagaatgaatcatccatacatgtgtgtgtacacacacagttatatatattttttttttcttaagatggagtttcgctcttgttgcccaggctggagtgcagtggcgcgatctcggctcaatgcaacctctgccttcaggttcaagcaattctcctgcttcagcctcccaagtagctgggattacaggcgtccaccaccatgcccggctaattttttgtgtttttagtagagacggggtttcaccatgttggccaggctggtcttgaactcctgacttcaggtgatccacccgcctcagcttcccaaagtgctaggattacaggtgtgggccactgcacccggccttataaacattttcaatatgtagttttatatgtaaatttcatgtgtcaataaagctatttttttcaaaaagttaagtcatggcaatgatttggggaagtcattttattttcctggtgcatccatttgaggcatagggatacattgctaatattctattgagtattaaagtgttatgagtctgggttctttcctctcattgtccaaggggggcttccagctctctgactgttatgttcctgactgtgcctgatgaaatgaaaaaaacatgggtcttgtcttcacaccgacatttggatatatcctaactaagtaatctggtgaatgaactgacctctgactctcttttgatttaggctagaagtccaatgcactatccattgtgccacagagcctgcctgcttgcacgaattgacctctttgagacacagttcccttatctgaaaaataagagcaaaaatatatttcagttttaatgtgtgggatactgtatattcctagcatggtgcctaacatatagtaaggccactttggtatatgtgtagcacatgtgtgtgttgtatgtagcacatagcatatatacccttaccttgatcttgtaaacgacaaacaatattcatccacaaccactgctacttttctggagaacagtaatttgatctttctctcagaagttggcttgcaatggcagctccagaatttctgccttggagctaagagaagacaatcttggtagaaggggaggagcttgagaaaacgcttcttagagctgcatatgcataacaagcacactggttttctaaaattctacctgtatatggggggttgtttgggaagactgatagagttctctcagttgccctttggtgcctatattgtctcccctgtctctcttaaatggaactgaaatgtcgaacagaaaatttttgccttatttttttctctttgcagttttctttaagtagaccatcagtcctctgctatctctattctctatcatagacaaggtcagataacagcaaggacattttctctgttccagggtggtaattaagagggaaatgtcatagtccattttatgcaatttaagccctgatcttttgattagagaagggaggaaaaaaacaattgatggcccctcactttctggagttgaggttccatgtggtgcccagaaccctttctgtttcttcaggtttctattgaggattctgatctcattgaatagatttgattattattatttcataatgcagagcctttttatttggtccacatgttgaagagtaaagattccttatttagaccccttttccctggcacatcataagtacttactttgtctgttgaatcaaattaagcaatatccatgtaaagttttatatgagagtttattgagtagaatttggattggcacctgtagcctgatttctttgatccttgaaggaacaaaatatgttacatccatttgactggaattcccctagcaccaacagcctggttgtgaacactgtgccctatctttattatacgcagagttcattttggtttcaatgtagtcattactttgtatttctcattttttccactcttatcaatcttttttcatgttgtcgatccttttgggaaagaggagctagtattggtttcttaattagttcttctatctctttgaagataaacatttcccatcaaatattagccttctttacaataaagcgcatgttgtatttcaagaaatctccatcttttaggcaggctttctcagtgggtgcagtgttgcaatcagaaattctgaaaagcttgaggagacagtgaaacagtgaaagcatctagtcatatttgctacctacagttaagcaaagaccagatcactgccaaagttgatctgtttggtcttccttgccatctctgccatcttctctttgattattgcattccatagcagctcagtttcacatacttttattgagtgcttactgtgtgccatatattgcacttaggggactgtgaagaggcatgaaacatgcttcttgctgttgaagactcaatagcaagtaattgagttgaggggaggtagactcattcacaagtaattataatgcaagctgactgctctgagtcctaggatggaggaacagaatgaggtgggagaatggaggcatgagagacaaaaagtacctcttgaaagaggcaggatggggaagtgaataagagcagaggctttgggtccagccaaacctagcttcatttcattctgttgtgactgttactaaacttcaccaaaacctcagtttcctcagtgggactcccacctgccactgtgcttagtgcaagcatcccatttagttgtttatggaaactgcttagctgagtgtctagcctagagtacatgtttagtagatggcctttgtatgaggatgatgatagtgttaaagaattttaaaagtggaggggacttaggaaatcacttaattcattctcctatgtttatattcttggagactctgagtttgtgattctcccatagcttgggaaatagctgagccatcatagtctagtattcttcccattaacaacctgaaaagtgagtgtggacgtactcatgtgtgcacgtacagatttcatggtgtctgtaagtgatgacaaaagctttaataactggcacactagcataatatagaaatcaatatatatcaatgtaaaatataacccccttttattctgtaaataaatacacacaagcacatgtatattatcactgtttatagcacaaattatcactctaatttccaattttttaattgatttttggacattctgaagagtattcttgttactagctaaatgatctccatttccgggccatggtttgacatagggaatgccagccaaaccttccagcaacttccccattaaattgattattctggttgggcgtagtggctgacacatgtaatcccagcactttgggaggtcaaggcaggcagatcacttgagctcaggagtttgagaacatggcgaaaccccgttgctgcagaaaatacaaaaattagccaggcatgggtgcaaccctgtagtcccagctactcaggaggtggagttgggaggatcgcttgagcctgggaggcggaggttgcagtgagccaagattgggccactgcactgcacagcctgggcaagagagccacaccctgtctcaaaaaaaaaaaaaaaaaaaaaagaaaaagattatcctaagggccctggcactttattgcagtacaaagagagttgggtgtgctattgccttgtaagagctgtgatggtcttggatgcctatgcttcctatgtggcctgaaacgagaaagcctgactcattggcattacctgctctgtggcctctgcctgccagtgcttagctcccctggagccttccatggatgctacacatgcccctgcttctgctctcttggtctgttgagcagctgtgtccagggccacagctgtagcttataccacgtgccacctagtacataagtattgtaatatatcaaaaaccagtactactgaatctgagtgaacctgaatattagtcctgcaaatagctcacaataagtcctcctaccaggcaccaggtcacgtcaagatgagaagcagaaacttcagagtgataaagaggttcacttctgttaaacatttgttcttctgaactatcaaaagtgaagagtttccatgggccatagcttggatacaccaataggagattcttaccctagggaggcttgctagacacatctccagtctggctttgttaaccctgaaatggaacagcatggctttttttttttttttttttttttctggccaaggctgcgtgagtttgctagaggcagcatttttttgtggctttatcttctatgtgccattctattaatatttctattctacagataaggaaatcaagacttctctagactatatatccagctaatagcagaggtaggatccagatcagttctggctgaactgaagctgacataaagcctgtattttaatacaggttgccttctgtaatgcctaacctcttgtttggcataggggttattgatttgttattttgctaaatgttatctttttttctctgaaattttaatttctagttggattcccagccatttgtgggaggcattccttggaatcatgtactatgagtgctgaatttctaagaattaaaataaaaattctgacaggcatggtggctcataactgtaattccagcactttgggaggctaaggccggccaatcacctgaggttaggagttcgagaccagcctgggaaacatggtgaaaccctgtctctacaaaaaattaactgggtgtggtggtgcatgcctgtaatcccagctactcgggaggctgaggtgggagactcacttgagcccaggaggtggaggttgcagtgagccgagactgcaccactgcactgcagcctagataacagaatgatactctgtctcaaaaataaataaataaataaataaaataaaataaaataaaataaatttaaaaaaataaaaatttctggtcattttagaagatctcattacataaaaatcacaatgtcatgcgtgttattatttgatcctgttgatgacatgaggcatgtagaaaagtttttgttcttaattagttccagtttatagggtggggagttggtggggggaaggaggcctagaggagtaaaatgacatactcaaggtcacacagcttttaagcagaaaaaccaagtttcaagtctgagacctctcttctcaaagtctgttacatttcctcaaagcttccctggagtgagatgaatggggaatgagacgtaagcagcctttggagccaaagcagtggctttttccatggtatatctacttgttatgcccatacgatccatttctctaactgctgggagccaagatctgaaaaatctgttacaaagaaggatgatgaagccctttgtgataatgacacgagttccttccttgccctttgccaagcactgtgaaggaatggcttttccctagagtggggcatctctacagagtcactttagtttcagggatttctatcccacagttgtcaattttatagaagccaggacaagacatttttaacattgtgactcttaaccactgagaaaaatgcccactggtgaatgggaacatgaatatgacatgattctaatgccaagttcactttatcagtcgtctctccaaaaggctgatcctgaacactatgggatactaactcactttactagacctggatgatgaaaacattctggaaagaggaaaagtgatgttctgtggaagtgtttttgtggagtcccagaggatccactgaagaaggctgatgtcccaagaactgcagttggtgccaagtgttggttgaattcttgagagcaagaactgcagttggtgccaagttgctgcccatctcctccctgtccccagcatattagatcatcttgagtattgatgctggagctgagacagttaccactgtgatgaagctgggtctgaagtcttagaataagtcaaatgtagaaggatgttccttcctggcaagcccctagcctgcttggagtgaggggggcacacaggctcttggagggctgttggcagcatttgcctgcctctcccaggccagctgagaaacttgtgtggctgtgaactgtgatgaatcacgcaagaggaaggaggtctctacagctgttgaggaaggacatatcaaacttgaatagcatagcacttggctctttattttatgtaacatatttttaattgtaaaactaatgaatgtggccgggcacggtggctcatgcctgtaatcccagcacattgggaggccgaggctggcggatcactttaggtcaggacttcaagaccagcctcaccaacatggcgaaaccccatctctactaaaaatacaaaaattagctgggcatggtggcgggcacctgtaatcccagcttatcgggaggccgacgcaggtgaatcacttgaacctgggaggcagaggttgcagtgagctgagatcgcaccactatactctggcctgggcgatagagcgagactcagtctcaaaaaaaaaaaaaaaaaaaaaacaaaacctaatgaatgtaacttgcagaaaatttagaaaatataatcataaaaacaaacaaaaatcactcatcattttcccagatataattaaatataattactataactgttttgaaaatgtagtggataaaagcctggactctagaatagcctgcatgggtacaaatcctggcttactaactgtaggacctggggtgaatcactgatatgtctttgcttcagtttccttgtgtataagatgaagatagcaatggtattgccttcatagggtatttgtgaagattaaatgtgttactacatataaagaatttagatcagtggcctagtatgtggtaggcattcagtaggtttcagttgttattattttatgtttattatatcctctgaattgtttctctaaactgagatagttttcttttacaaaagtaagattacacagtggattatgtgttgtagcctgcttattttacatttagcctttgccatgcccttctgtacttttctgcaaaatgattttagtagctaaccatatggcgttattagagatatttaacaattcccttactattgaaaaaaatacatcatttatagcctcttgccatggtaaacactatcttgatgaacgtctctttttggtaagtttttgcataccatccttcttttgatgacagtattttatgggggagcatttcttcttagaggaccagatggaattatccacagcccagggtgccataggcatgtactgaataagcatatgaggggatgatcactatgcattatggacactccttctcctttgataccacttctcacagtgttttgtccacggctaagaaatcaataaaatgtttatgaaaagcagccacacttttttatattttcagttacattaaggcagttaagactagccctagcatttgtgtttatcttctttatataatttctaaatgactattgaatcatctcaaatctcttttggaatgaagctcgatacaaataaatgatcaaacagccaactagcaatctagtgggagacagaaattctctcccaggaaacacaaattttatgtcactcttgacagcaaggactggtcaggttcctacaacttggaaggaataggatactgcgtctagtttcccaaacattaggaatcccaaggaaaacttatttcttacacccttaaagtgactcagaggtaaaagtgcaattctctgatgtttgtccttggtgggcttagattttcacaccacagacatcattgaaacaagaatctacttggagccttagaggcagtcctggacctttctctttggatggcactcacatgctctgtcaactctgatgtcctcaccttcactctcttacaccctcaaatccctgaggacccttagtaagcagagtgttctttccactgggtgccattttagccaaagtatttagaaaggtgttggaggtagcaagctctgcattcctaagaacacaagtggtgttaaccatctgatgcaagggttggaaaactttttctgtaaagggccagagagtaaatgctttagactttgtgggccgtaagatctgtggcactactattttaactctgcattgtagcatgaaagcaaccataggcaagatgtaaacacataagggtactttacttctggacattgaaatttgaccctcataccagtttcatgttatgaaatatcattcttctttctacttttttcaatcatttaaaaatgtaaaagccattgttatttcacagactgtacaaaaacaggccgtggactggatctggcccatgggatccagtttgttaccccttgatctaccgtggtcattgtttgtcttctgcatttctttctcattgcaccattttcttctttgttgtgccatattttgaaacctctctgccctttctcttaactagctgaggctaaaatatttgcagaatctgcacttttggcacttatgtggctcatcagggaaagccagaatatctacctaaaagaaccagtagagcaacatcaaataatgcccctcttcttttttgtgtggccttgccagttcaacgtataatttgaatatatgaaggttacagatggactctggcaagttgttctgatttctgcagcattccaaagctctaatgagcagagcatgcagcctgagggatggtgagagtctgatttttagataatcaaggatatttatatcttttaataggctggtgccttgtagttctattccagcataaaactgagagttgaagagacatctaatcaatttgatgtcctctctttaacagttatatatcaaaggggtgttcaggctgaacacatgaaaatgttacagggatggaaatgggagaattataaacattttatgctgctctatcctcactatatttaaaacaaaaacatgatacagatttttacatggtggggtgtgtttacagggaaataatgtgctctatttcatatgaaacaggacacaagagagcattctcagatttgtaacactagccgtagtctgtggaggtgcccattagacctgttcctggccttttattcagggctgtgaagcagtaggggcgacagaggctcggctgcctgcgtaatgagattgacttggtttgcctggcatgcagtgatttatgagggtgcttattgtagggatatctgccgctgagagcagccagatgaaaggtgtgtgggtgagaggtggaggagagcagggaataggagagaggcagttgtgtataggcaggtaaggctcatcttgattatagttgttggaatcctgagctgagtgaagatgtagaatagtgtgaaatggtagattagcaaggctttggaattgcacagatatgggtttgaattgctgacccttccactcgttaactggactctttggtgagttactttccttctttgagcttccattgcttcatctgtaaactggggataataaccacttccactctcccgctatatgaaactgtactatcataaaggtctgagcacagttcctgttgcattggagagctcagttagtggtagagatgattaatgtttgtccatatgtccattcattgtttgtttaccagtattcaatgtgctttgcaatttctaacagagcctcattttctaatagatgtctaatggtgacttagacatctgttaggtatcaatagctcttaagatcaggatggaagaacatgacagtcaacatgtatttatagatatatgtatgaacatctaagtggcatgtaggagtgtactggtacctgaaatatgattgaaagaacagccacctggccagtaagcacagtaaaagatacttcacctcactagtaatcagggaaattaccaaaataggaccaaagtgagatacttatttatacttgacaaagtggtaaaaatgtaaaagtctgacaatactaagtgttaaggagaatatagagtgaaggaacacatatgtactagttgtaggaatttaaactgctgtgactgctttggagaatggtttgtcaatatctagatatatgaagtgtacataccttatttactggcaaattctgcttgtaggtataatctagagagagtcttatgtatgttatcaaagtcatgtgttcctcactgtgttgcttattataacaaatagcctacgtgtccatcagtggggtaattgatacacacattaattgagctaaagctgcatttggtaccagcataggtgaattttaaacaaaagtaagtgaaaaaaataaagttgcaaaattatgcaaatagaaaaccatttatgtacagcttgaaatcttggaaaataatattaatacattttttgtggatacaaacatatggaatacaagtttgaagaaattaattggaatgacaaatataaaattcaggctgatattaggagaagaaagtgggatgtgattggaagggttgcctgggttcactagcttgtatgcccttagacaagtttcttaacgtctgtgcctcagttttctgatctataacataggaataataatattatctatttcattgggatgctatgaggattaaatgactgaatatagataaaatgcttagaaaaatacctaccagatagtaagtgttatatataagttagcaattatagtgcctattacgtgaatatttttattattctttattttgaaaatcttatatattgcaagttttgaaaaagaatagatgccattcttgtcttttgtcatcatatagttggaaagtgaacaaagattaaaaataccatcaatacaggaatttcaggatgtggcataatagagtttagctacgttctcttgacccctagatttattaggtaccatgccaacagctttatatgcatttatttaatctttccctatggagtaggcacaatttttatccctattttacagatgggaagaaagagatttagaaagactgacttccagggtcacacagctaggggtagcaaagctgggcaggaacccaggtgagaatgactcacgctcttgactgctaggccttaaagccctacctggccactgttcacattaaccacctcctctacacagattcctgcttccttcctgtatcagcctgcataggttaggttgtgctttggttatgaacattcccaaaagatcagcggcttctattaacaaacaggtgtttcttactgtattagtctgttttcacgctgctttaaagaactacctgagactcagcaatttataaagaaaagaagtttaattgattcacagttccacatggctgtagaggcctcaggaaacttacaaccatgacagagggtgaaggggaagcaagtcacatcttacatgatggcaggacagagaaagagagcaaggacggaagtgccacattttaaaaccttcagatctctcactgtcatgagaacagcatggggaaaatccacctccatgatccaatcacttcccaccaggttcctcccctgacccgtggagattacaacttgagacgagatttgagtggggacatagaaccaaaccatattacttactcatgccaaatattcatcaaaggtcacctgggtcatcaaaggtcatatgccacatagctcctttctctgggacccagaagtcatggacagagcagccacagtctccaaccttgctgattgctatggcaaagggagagagaaatacagacagagagagagagagacagagaaagagagaaagagagagagaaaaactatggagaatatcacattgacagttaaatgtaccctggaagtgatgcacaacatacactgtgatacacagcacttcccctcacacacataggctggagcagtggttttcaaccaggggtgattttgcctccactaggggatatttgccaatctctggagacattttttattgtcacaactcagaggtggagtgggggttggggcaggtgctactggcatctagtgaatagaggccaggaatgctactcaacaccttgcagtgcacagggacaaccccctcaaaacacgcacaataaagaagtatttagcctaaaatgtcaatagtgctgagattgagaagccctggactggagctaagcacaaggggccaaaaagcgcaattttaagaagctataaagggaagagaacctgaaatatttgacagatagcactaatagctgccatgcatcctaaggcctaaaagctgtactaaagccccttcagaaggtgtttttcatgatagaagtgaaccagtgctttaagggatagccatggaatggggcttctagtatagtcagcttcatcagagggccgaggagtgccctggactcactgaagttgactactgctcttcctcagcagtctctctggagcagcactgtccaaatgtagtacaataaaggccacatacgtagcttaaaaattttcagtatccacaccaaacaggtaaaaaggagcaggtgaaattgattttacagctataatttctttaattcaatatatttaaattattatttcaacatgtaatcagtataaaaatattgagatactttacattcttttttttttgcaccaagcctttggaatgtgttgtgtgttttatatttactgcacatttcagttgagactagccatatttcaggcgctcaattgttacacatggctagtagcggcaatactggaggtttctgttcctgggactcagtgagggactgacctgggtctcccctgaggaccagtagcaatgctataactcagagtctataagttctgagagtgggacacaatttccaggaatatctgtcccagactcttaaagacagtctgtgtatgttttaagaatgaagagggattggttttccgtggattctctgccatcaccatttttgtttgtttgtttttttttttttttggcaggtgcctcatctccagacatggagcccagctatgggggaggtctctttgacatggtaaaaggaggtgcagggaggctctttagtaacctaaaggacaacttgaaagacaccctcaaagacacatcttctagagtgatacaatctgtgaccaggtacgcacattcttcccagttaatttagtggatccccatgctctcaaaggatctggttacctgctgactgcttgtctggctcaaagagtgtcaattttgggatataattttatgggatctgatgaactgagaaatgtcattgaagacataaagttaagtcctttagaagctataagcacgggctgggaggactcagttcattgccacattagagtataatggttgccctccctgtctttagaatcaaacatcttgggttctaatgcaatatctgcccttgttaactaagagccctcaggcaagttaattaacctctcagagctttttttttataccctgacaggatttgtgtctttgggttgtttagggattaaatgagattaaaatatacatgcaatctgaataagcattacctacggattgtaatcaaatcagaactttgtttttgtttcctactagccctttaacatttattcagtgagagaagtttcctactcttccactgtatgaaaattcttataagcaggtcataggagttattttttattgtttagtattagaaaattctagggtcactttgagttacaatatgcagttcttaatcagaaattcaaacgtcaagtacattatattaatcaaaattttaatctttgttcaaagataaaactattcttacctctgattctcaaccagggcctggtaggcagaaaaatggtgtcatttattttttctcaaccacttcttcccctaccccttagccacttacaattatggaagatatttccaggtaggcaaagaagctagaacaattggtgttgataaataagcagagttttctattctgagattgattcagatcatgaagtggcatctacaagggcattagaatgcaccagttggagtggcatatttatacccctgaggtcacgggctttcttttctcagtgatccttccttgttggagagaagggctggaggggagtcgaaacatgccccctggacagcggtgtcccagttcatatgcgcaagtgattgagagagagaaatcttggcatatttggatcattttaatgagtgcccatttttgtcttgcttttagctacacaaagggagatttagacttcacttatgttacctccagaattattggtaagtttctcatgtttattaacagtcctttggctcagtttcccgttgctgcccatcgttatagcagacgtaaacatttaacctgttttctttctgtgtgatctctctcctagtgatgtcctttcctctggacaatgttgacataggattcaggaatcaggttgatgacattcgaagctttttggattccagacatcttgaccactacacagtatacaatctgtcacctaagtcttatcgaactgccaagtttcacagccgggtaaggatttttagccctgagatcatactgttgaagacgtgatggtgcttttcctcctcagagatacccttaaagcacgtgcccttaggcatctgaagctgaaaaactatacactctggacacttctgttcacaaaatatttattaggctgctatgagatatcctaaagattttccttgggtgaggatacttacaggaaagtgtatctgtcaatgaaataccatcgaagttggggtctcaagtctgttggtgcctggttgttccatggcacagtgttcatgaggcttaagttggagattgaactgctgctagggcagttggctgccttcatgctgttacactaattatgccgttgacccttctttattgctacttggtatcaagataaggcagtgtggatagaccggtactgacaagtattaatgggaacgtgtttccattaatatattttaagaagttttttgaactagagagagaaatattcctagtttcaccttggcttaggtttgaatctgatatcgagcctgatatttctggccactgaattctgacttactcactaaaaaaaggcatttttttcccctctcaagaacatctctaaatatttttgacttagccttcagatatgattggttctgcaacttcatttgggtctattaataaatagaatggactttctatgcatggatcctttaaaagtgaaacttgatgtcaaatgtgtaaaatgatagctggttgacaatgctgtgtatctaggatcttagctttgatgctggaacacacttcgttccaaattccagttaccattgataatctctgggcctcagtttccagatctgtaacacacacaagaaaattggtgtacatgctttatatggctccttcctgccctaatattcaataagctatgggagagttttaaggacctctttttcagcgtattctgagaacagtctcaaattttggtgtgcatcagaatcacttggagggcttgttaaacacagacttctgattcagaaggacaagggaggcataagaatctgcatttctaacagcttcctgggggctgctcctgatgttgctgcggggaccactctttgataaagcactgataacgccattctgaagtggtttgatctaaattgccattctataatgaagattttaaatgcatctctttaaaatcttctgtaataaaataaccttccaactcttattccatctattagctaattcagaacaagtgaattaacatcaaacaaaaatgtggatagatattttgttcttaatgtaaggcaaatcttttgaattatttttcttgactggaggctaagtcagtgccattattttcataatttaaggactgtggaacatcctacacaatatttcatagaaattttatttgaccttgaaagatctgtgataatctggagcattttccctctgaaagtaaataaagatatgatatcattatagaagcatttatacatataaagatgtctctttgtataatgtttataaaaggcaatctctataaagatgtttttaatgaaaggcatctatcagtgtaactaaagattttgtgactggacttaagggtttaccaaaggaatcagagattacatattaaacacctaccctgggctgctcttacttgccctagaagaggagggagcatttttttttttttttttttggatacctagaacaacagttcctgacatagataatcaatgtttttaaaaagcatgaatgtgctgcacccattaactcgtcatttagcattaggtatatctcctaatgctatccctccccaaaaataaaaaataaaaataaaaaagcatgaatgtggaaagaattgttaaacactatagatataaaataaatatttggtttttgttctcaagacacctaagcctagttggcgagagaacccaggacgttctaaagataagtacaaataatatttataatacctgccaagggagattagtaaagggagacaccagtgacagctggaccttagagcaggagaaaggcttatataggtcagaggagtggagtcatttcttgcctatacaaatcataaaatatcttgtgaggctcttgatgatctagcctctatctgctcctctaacttcatcttttaccattcttcattgcccaaaaatcatatgctccaatagggataggcatgtgctcatgtgcacacagacacacacaatcttcttgcatgagctactccttctcccttaaaagctacccatgtcacacacccttcgtctccttccttccttccttcttcccttctctttcctttctccttccgttttccttcccttctccttcccttctccttccttccttccttctttcctcttcttcctcctcttcttcttcttcttcttctcctccttctccttcttctccttctcctcctcctcattcttcttctcccttcctccttccttcctctctcccttcctcccttcctcctcctcttcctcctccttcttcttcctcttcttcttcttcttcttccccctcccctcccctcccttctcttccctcccctccccttcccttcccttcccttccaaaagagcctcactcagttgcccaggctggagtacagtggcatgatcttggctcactgcaaccttcgcctcctgggttctgattcttgtacctcagtcacccaagtagctgggattacagatgtgtgccactatgcccagctaatttttgtatatttagtagagacgattttgccatcttggccaggctggtcttgaactcctggccttaagtgatccacctgcctcagcctcccaaagtgctgggattataggtgtgagccaccacccccagcccatcttcttctttatttgcctaattttgctaaggagaagatttccacatgccacgaggcttttccaattctctctcctaaaacacaggattgcactacatctttagctcttccagatagtcctagaatttggcagaatgcaagtggatcctctgacctgtctcctttacccttagttgcatcttagggaggcagtcccaaagccgtagtatttccatcttacctttgtttttgatttgcctacatctcttttcaaactcctagacctttctttccccagcactaacactgtgaatggatttgcatctcattgttgcatgacttagaaaagttttctttgtttttacctttcagttcatgaggactagaaccatttcttactccttccggttctgtggagtgctacgtctgaaattaaaccttattttaataaatgttgatggtagagtctaccataaatactaaacatggaactggttttatttgtagattcataagggtgtataaggtcttaggaattttttatttataaactcgtgggagtctggatctgcccacatcatatacctctgtgccttgaaacctgaattcagtcattttacatgatgattatgtgattgtttgtatatgttcaaacctgcatttgaggatgtaggtagtgatgttggcaaagacaggctgtttccaggaagattttactttgctgagggttgtcattctgtatttcgattcacttttatgcttagaagccacattggttgacaggaattgtatgaaatgatcaatactgttttcctgatttttctattatgtatttgcatatgtcacagaatgttaaaataggactttgtttagtctcagtttagcagaggctacaactcaaaacaatgcatagcacatagcccagcattcaaaagcgaagtactggaatacctattcaggactgcaaaggatgtatgaaacctcaggtgtttttatttttttttaatgttttttgactctttatagccaatatccaccttgaggaaataagagtactgatgctgacaatgaagtcctggagaccaacaagatgcatcagttaaaccagatgttcataatgactcctctgtgtatgtagatctattgctaggcttcagagagcttaaccatctgtttctgctcctttaaaaaaattattgtggtaaaatatacataacataaacttattgtaaccatttgtagcataaaatttcagtggcattaattatattcccaatgttgcataaccaacaccgctatctatacttaaacctttctcatcatccccaacataaacactgttcccatccactccatgcatatgtgtgtgtatgcgtgtatacactggtttggtttctgcatagaaggtttatagctgtgccccagaatatcaggaacctttacacatttcttggcattactgttggcaataaatggaaagctggatgaatgtacactaagtctaacctgattccagagttcttaagttctgattaatgctattctagggccactttgtctctccttcttccactgtttacccaggaaggacagtatggtgacagagtccttctagcagcaaagaaatctgcagcccagctggttgttttaggctctaccctcttaactatttctaaatgacataatcttctaggatttctttccctttgggaacaatttgatttttggaaaatgtattatcaacttgggtgtcttaaaggactcatgattgaaggtcaatgtttttacccctttttcttcctgagcacaccaaagaggtcgctacagctcccagttgtttctgcattggtgggaggttggtgggagattggctggagtgggagaagtttatagctcatatttcatctctcactctgctaccatgcctcagtgtcaggacaagaaataactggagtgaaaaaaacaatccctggcctgggggccagaggaccagagactcccacattctagttatgaagccttccatgaattgaatgtcttaaccctggtaaaatacagccatcacttgaagctgtaaccactctacaaatgcaaggtggagttattgttatcagtcatcagacaatgtagtataatggagagtgcacaaattttatttttttaaactgagatgaagccatatagtgtatacaaactttagactttaaaaattaccctaggttcacatctcagctgttcttcttcctgggcaagtcacttttacctctccttggactcgtttttctcctgtgtaaaatggatatgccaataagagagtgcctatctcacaagcactcttagaattttttttataggtttgttgtaaggaataaatttgatagcagtctcttgcttagagtcatcatgcagtaagtagtagctatgattaacattggtaataataaaatgctacaataagtgattgactgaattatccccatcctccaaaaatggtgtgtgattcataaaacactagatgtagcaattaagtcatactctctgtagaagcattcattcctatgcttagtgaatggctgcttctgcccatcctgtcttgggcaagggatgatggagagatgaaaattgaatggcatccagctctagcgatgatttggcttctttttcccactgggtggtatcatggcagtgctgtaatctgtatggtgtcctctgatgctaagcaagcccaggagatgttcaaggtgttcaggaaaactggcgacagcattgcgaagtgtcagctactgcatgaagctgtgaaccccagagagctacaaaaatagcttgcagtgattgaattccttttttattttgttggttttgtttatgccttagtgttttccccttttagacagagcacatgcttttaaaaaattctaattgtatgtttacttaatggtgtataattatatatcaagtaaatatataattatggagtactttaaattaatattatttacttgattgagttaatgattctggagctattagcctattgtgctaagaataatttagccaacttttagctgagactcattacagatattgacatttggggtgtgtgtgtgtgtgtgtgtgtgtgtgtgtgtgtgtgtgtgtcatagccagtttttaaaaccttcaaaaatattgctggggaaataaattttctatactttcattctgttacagtctaaaaaaaacccaataaaatgggttcacctgttccctcctcaagatatggtacatgtggacaaatcttattataaaaatagattgccaaatggggttcattcctttattctttcactcattcattcactcagcaaatacctgctgagcacctaccatatgagcaacacatgcacagtggacactggggttacaaaaatgagtaagttatggtctctcttctcatggagcttggtgtctacaaggggagacaggtataagcagtttattcagtacagcttgaccgcaagctagcatttactgtgtttatgttgtgctacttaattctgacaacaatcttgtaatgctcatttatactttacacactagataattgaggcctggagaggttagtaaattgcctaaggttaatcaagtagtaaatggtaaatccagagtgaaaatccagcctgtggatttaaccatgttgttctactgaaaaaagctgtaatagatgaaaataaactggggcatgagtataaagatgactaagcgtttctgtctgtgagtattagagaaacagtcagagccaagagaacacttgaacatttttttcttttttaaaaatttgagttaaaatatgcatatataatgtaccatttttaccattttaagtgtacagtttaattacatttatattattttttcctccttcaaaccctctcccactcctcttcctggcctctggtaactactaatctactctttatcttcatgagatccacatttttagtttctgcatatgagtaaaaaacatgcaatatttatctttctatgcttgggttatttcagttataatggcctccagttccatccatgttgctgcaaatgacaggatttcattcttttttatgtgaataatatttcattgtatatgtataccacattttatttattcattcatccattggtaggcacttaggttgattccatattttggctattgtgaatagtgctgcaataaacatgggagtgcagctttatattcgatatattgatttcctttcttttggatatatacccagtagtggaattgctgggtcatatggaaccttcatactgtcctctatggtgattgtactaatttaccttcccacctacattgtataagagttcccttttctcacattttcaccagcatctggtattacctgcctttttgatacaaactattttaactgaagtgagatgacactatattgtgattttgatttgcatttctctgattagtgatgttggacattttttcatataactgtatgccatttctatgtcttctttggaagatctgttaattctcttcaactcttttgcccagtttttaatttgttttttttttttattgttgagttgtttgagctccttatatattctggttattaatttcttgtcaaatgaatagttcacaagtatttcctgccattcagtgggttgtctcttcacttcgttgattgtttgctttgctttgcagaagctgtttagcttcatatagtcccaattgtgtatttttgctttggttgtgtgtgcttttgaggtcttccacaagaaatttttgtccagatcaatgtcctggaacatttctctaatgttttcttctagtcattttatatttttgggttttggattcaagtttttaatcaattttatttgatttttatatatagttagagatataggtctattttcatttttctgcatatagttacccacttttcccagcaccatctatggaaaagactgtcctctcccactgtaagttcttagaatctttgtcaaagatgaattggtggtaaatgcgtggacttatatctgggttctctattttgttccattagtccatgtgcctgtttttatgccagtaccatgctgttttggttacggtagctttgtaaaaaactttgaagtcagatgatgtgatgcctctaactttgttctttttgctcagggtggctttggctatttggagtcttttgtggttccacatacattttaggggtttttttttatttctgtgaagaatgtcattggcattttgatagagattgcattgaatctgtacattgctttgggtagtattgccattttaacaatattatttcttctaatccatgagcatggaatacctttcctttttttgtgtcctcttctatttctttcatcagagttttacagttcttcttgtgtagatctttcacttctttggttagattgattcccaggtattttatattttttgtagctattggaaatggcattggttccttgatttctttttcagattgttggctgttagtaaatatgaatgctgttgatttatgcatgttggttttgtattctgcaactttactgaattcgtttgtcagttctaacagtttttttggtggagtgtttaggtttttctagccataagatcatgttgagttcgaacaagggtaatttgacttcttcctttccaatttagatgtcctttatttctttttttgcctaattgctctggccaggacttccagtattatgttgaataatagtggcgaaagtgggtatcgttgttgtgttccattctttagaggaaaggccttcaattttcctccattcagtacgatgttagccatggatttgtcatagatggccattattattttgaggtatgttccttctgtatctattttctgaggatttttttttttttgagacggagttttgctgtcacccaggctggagtgcagtgatcttgactcactgcaacctccgcctcctggattcaagcagttctcctgcctcagcctcccaagtagctgggattacaggcacctaccactatgcccggttaatttttgtatttttggtagagacggggtttcaccatgttggccatggctggtctcaaactcatgacctcaagtcatctgcctgtctcagcctcccaaagtgctgggattataggcgtgagctgccgagcctggcctcatgaggatttttatcataaagggatgttgaattttatcacatactttttcagcatctattgaaataatcacgtattttttgttcttgattctattcatgtggtatataacatttattgatttgcatatattgagccatccttgtaccaatgaagtaaaacttttttttttttttttggagacggagtctcgctctgtcacccaggctggagtgcagttgtgcgatctcggctcactgcaagctccgcctcatgggttcacgccattcttctgcgtcagcctcccgagtaactcggactacaggcacctgccaccacgcccggctaatttttttgtatttttagtagagacgggatttcactgtgttagccaggatggtctcgatttcctgacctcgtgatccgcctgcctcagcctcctgaagtgctgggattacaggcgtgagccaccatgcctggccatgaagtgaatctttgttgataatggtgaatgatctatttaatgtgttgttgcatttgttttgcaagtatttggttgaggatttttgtatctgtgttcttcagtgacactggcttgtagttttccttctttgttgtatccttctctagttttagtatcaggtaatgctggctttgtagaatgagttcgaaagtatttcctcttcttccatttttaaaaaatagtttgagtaggattaatattcattcttttttaaatatttggtagaatacagcagtgaatccgtcaggacctgggcctttctttgataggagaatttttatacagcctcaatctcattacttgttactggtttgttgaggttttctatttcttcatggttcaatcttggtaggttgtatgtgtccaggcatttatccatttcttctaagttttctgatttgtttggtatataattgttcatagtagccgtctcttatgagtctttgtatttctgaggtctcagttgttaggtctcctttttcattcctggctttatttatttgggtcttctctctctttttcttagcttacctagaggtttattgattttgtatattgtttcaaaaaaaacaaccttttattttgtcgaaatttttttctttttagtttcaattttcttaatttttgctctggtctttattatttctttccttctagtaattttggctttagtttgttcttgcttttccagttccttgaggtgtattgttaggttgttaatttgaagtctttctactttttcgatataggtgtttattgctataaactttcctcttagtacttcttttgctgtatcccatatgtttttgtatatttccattttaatttgtttcaagaaatttttaaatttccttcctaatttcttcattgactcattggttgtttaatttccatgtgtttatgtattttccaagtttccttttgttatttagttgtaaagttttattccattgtggtcagagaagatgcttggtatgatttctattttatttatttatttattttatttatttatttttttgagacgaagtcttgcactgttgcctgggctagagtgcaatggtgtgatctcagttcactgcaacctccacctcccaggttcaagtgattctcctgcctcagcctcctgagtagctgggattactggtgcctggcaccatgcccagctaattttttgtgtttttagtagagtttcactgtgttggccaggctggtcttgaactcctgacctcgtgatctgcctgcctaggcctcccaaagtgttgggattacaggcgtgagccaccacacctggccaatttctgtgtttttgaatttgtacagactcgttttgtggactatggtctattctagaaaatgttccatgtgctaatgaaaagaatataaattctgcagcagttgggtaaaatattcagtaaatgtcaataaggcctattagatcttgaacctgggttttaaaagatgaattggagtttaccaagagaagaaaatacattgcagacagaaaggagcttgtacaaatgtacattttatgattcctctgacagcaaaatgtatcttcccagttattctgtatttttagtcagtaagtcatttccgttccttgaaaacaaacacgtcaatggggaatatatatgtgggtaaagactagaccagaaacagtcctgaatcatgttgggtaaaaggggcaaggcatcataaagtttaaattgacagaggccaatgctagatcaccctggactgtttgggagctatgccaaacatttcaaatactttgtttaataaaccatacttgtctctcctaaaggtatatgaaagtgggtaacctggaaggtctcctgacatttgccccacagtcatcttgtagaaaaaagttacaaattaacaaaaaagaatgggctttcttggcagccccagacagagaaactcaatgtgtttgcttttagacgtcagctctaccaagagcacagataatttcctagtcgtattttgattatttattatctgattaccagaaaagggctaatcaaacaaattcctcctgcctccctttcccatggtcaaatagaaggaattcgagacatttgggattgcagagcacattctgacatcatctgtatgaagcctcttctttctgcagaattccgtatctcaggaaatagcacttcttgtatccttctatccagccattcaagctggaaacttggagttcaggcttgactctttcctctccctcccctgacacactcttcagtacacccctccacatgcacacactgccaccatgtatcacctgtcttatgtccaggtgtcccaccacctatctcctgagtccctcaagtgtgtttgtaccccactgctactcagctagccttagccactatcatcccttattgacactcctcaccaacctcctgactggtcttcctacctttaggctcttgttatccatttctgttctccatactggagcctgaaagatctttggaaatgtagatctgagagtcattctcctccttaacaagactgtataatctggcccttcagtctacactctcaccatgaaggacttcatttttttcaaacatggccagtcctgactgcagggctttgcactggcagttacccgataaaatgataataattgccaacatttattatcactctgggtgtgtcagatactgagctaagctcttgaagtacatgttcatgtagtatcctgtgagttatgtaagaggtactgttcaccacattttatgaagaaaggcttaaagaggttatgaagtttgtccaactctaagcttctccttgttgtttcttagctagattagtaagtatgtaatcaactggggatcatgccttaacagtattttgaggcaagtgataatgtcagccagtgtgctgttgtaacatgatttatattcagaagatctgggctgcagtgctgacgctgagcagcagtgtgactctggataacctctgagagtcagttttctcatctgcaaaatggggtttatattaatacctgtcttagatgattgttgcatggatcagagccaagcaatattcctataacttagttgatgatccataatgtgtgaaaaaaatatgcatgttaaatgaatgaaaatgccaagggtttcccctgtaagttgtgtcctttgattaaaagagaaaaaaaatagatccatgcacaagcctgcctttggctcactctatagcacttttcatgttatcacgagagctgggataaattagagatggtgcaggacttataaccctataattaaacatttggggggaggtcaaaacattttatgcttaatagaaatgaaattctatgtaacctcacagaatagaaaaaaatccaaggatgtatttgaaatggtctagtttaatttaaaatgtgcttcaaaatgtgttttcatacctttactgaatgagaattctttaatttaaaaaattgctgtgttaaacaccctcttcttcatgcatttggaccctgttcccactattcctatctatattaagagaggatgtggtatcacttccagaagatgttggttggtgtgataacctgcttatgaagaggaagttgctggaggaattaatttccttttgctgtgctcccttaggtctcagaatgcagttggcccattaggcaggctcccagtctgcacaacctttttgctgtgtgtcggaatatgtataactggctactgcagaatcccaaaaatgtctgtgttgtccactgcttggtgagtaaccttttgttgttggtggtgatggtttggtttggtcaaatatggatgagcctgtacacaatggtagacaggtaacatttgagttcaataggatttactgagcccatatttaggaattgggtaatgtgagagttgtaaaaataagaaagggatttattattcttgacttaaagcttgactactagtgggaaaggcagatgtatacacaactcacatagtgtggggactctagaatgtgctaagtattataaaggaggtagaaacaggagtagtgtgtgcacagctaaaaatgccattgacttttgtgtgaataaagttaacattaacatattggcgtatttattttttcttcctgtttgtgtttgaataaaaataaaagaaaaaagatacctatgtccttgtaagaagtcacatagattgactgtattttagagcattcccagtgagactaatggtttttctgaccattgacttcctagagttcctttccctaactcttctcagaactcttgcctgtcctttacaactcaactttcagtaaaatccttctgactcttgagtattttcacaatacagacattcccattatatctaaatgtcttctgtggcttttaatactctgtgtcatagtaagctcttctcctgcatattttcccactagactattataatcttgcaggaaagaaccatgcctttttttaaacttttgtactgcaggcataaaaggcttcaataagtgattgaatacacaaatggaatctgagcattaatgctggaaatttcaaagcttctataaattttaaagcttctataaactttagtgtatatgtttttgctatagtattacttgatgattcccaaccccctgtcctttcttgagagccagttggctaaaacaggaaagaaagttaaagaacattttttctttctttttacttcacatctccaaactcttggcaataaagggataacacttggtgtttgtaagaatttaatgttaaagaccaaaggattttcctttccaaggcacagcagatggtgtaacagaacagattacttttagggactaagcaaccttaaggaccttggtgattttctctttactcaagaatttgctgtaagttcagagagcctacatctgacaacttgatggaggaaagatggctcaatggagaccagaaactcccagttccagtgattcttcataaagaataaaaacccaatgaagaagaaaaaagaagaggcaaacaaaagattatggttctacagggtgctcaataagctcactcaaaaaggacatgcatatgttggaaatgaataccatgtctttgggaaatggaattgaagctgggggagggagtttttttttttttgttttttgttttgttttgttttttttttttttttgggaccgagtcttgctctgttgccaggctggagtgcagtggcacaatctcggctcactgcaacctctgcctcccaggttcgagtgattctcctgcctcagcctcccgagtagctgggactacaggcacgcaccaccacacccagataatttttgtatttttagtagagacgggttttcaccatgttggccaggatggtctcgatctcttgacctcatgatctgcccgccttggcctcccaaagtgctgggattacaggcgtgaccccaccaggcctcttatttttatcttaatatactactggttattatattaaaaataataagcatagtggggcgtggtggctcatgcctataattccagcactttgggagactgaggcaggtggatcacttgaggtcaggagtttgagaccagcctggccaacatggtgaaaccccatctctaccaaaaatgtaaaaagttagccaggtgtggtgctgtgcacctgtaattccagctactggggaggctgaggcaggagaattgcttgaacctgggaggcggaggttgcagtgggctgagatcgtgccagtgcactccagtctgggcaacagagtaggattccctctcaaaaaaaaaaaaaatgataataacaataggctatactagtcttttaataaaaaaccaaagtttttaaaagacctgcatcacaggtaaaaagagaggctacatatccaagagccatggatctgtgaaaagagtgtcaggaaggctaaattctgaaaataaatcagattaagaaaaatatcctttttttaaaactgtgtttggaataagaacaacaacaatttcttgaagcatgtggtataatcttaactcctttattctgttttctttatcagagggaacaaatgtcaaactaggaagaacgtaacaatgatgtttaagacaaagctggtaggtagcaagatagtacgagagcctcacaatcctccaaattaattcactctcaaggcttaaattatgtgacacaataccgaaagcacttggagaagcaattatggatttcatttgtaatatgaagaaacaggaaggagaggtgccaggcaaatgaagagaggagattttttcccaaagtatggaaggaggttgatcctggaaagttgtaggcttgtgaacctggtggtaattcaaggcacaattctgagaaagttttgcacagaagattttaaactcttagcaaaaaaggaatctccattggtttgttatgagcacatatcaaaccaacagaacatttcacatgactaatagactagttgagatagtttattggagtcctgcaagatatttcttagttttttctagtcaagattgagaaatttggctaggttgttatatatttagttgagttgaggctgaatatctgcttccaaaggtaggtgattaatggatcacctttctcctgggagaaggctttatttagttattcattttaatcaacaactttgatgaagatgtggaaattcagcttatcaattttcttagaattataagggtcacatagtgaatttggattttaaaagttcttgtaggttggtcacttaacaaaaattaataatatgaaattaaatacaagataaatgtaaagtcctgaattctggttttaaaaaattaaacatatttgcacattaccttaacatgtcatctggaaaaaatctaggggttttagtggatagagagaataataaaagcttatgttgttacttagcctacatttatactagcttgggctggggttatgttaataaaagcatagtgtccagaataaagaagatgatatttcttctctagtttggtcagaatatatctcatatctttcatttcacatctgggcagcatttaaggttgtcattttaaaacttgaatttgtttagaagaaatgtgctaaatgatgatgtctcttaaaatggaaaatcaagtgaggaagaatagaagggattgagtttgttttaaaagggaaatagaagcattgatagaaagggagggtatttcagatatgtgaaggactgccataggaagaaaggagtaggtttattttttgttctcacaaaaggatgagggtcatttagtggaagctatggaggaatgaaagtcaactcaacatattcagtataaggaagagctctgtaaactggaatgggctacttcaagtatgagtaatctccctgtcacttaaagtgttctagaagaagctaggtcacatctgtcagggatgttactgaattttgtcttaattagcttgagctgctgtaacaaatataccatagaccgggtggcttaaacaacaggaatgtagttctggaggctggaaagtccaagatcaaggtgactgcagttcttttctttctttttttcttttcgaagagttggggtttcaccatgttgcccaggctggtctcgacctcctgagcttaggcaatctgctcgccttggcctctcaaagtgctgggattacagacatgagccactgtgcccaaccaaggtgcctgcacttgtaatgtctggtgagggcctgcttctggggtggcagatggctgtcttcttgtttttcacattggccaagggcagagggagttgacagcaagctcttttgtctgttcttataagggcacaattcccattcatgagatctccactctccctacctcattacctccccaaagctccacctcctaataccatcacattggggttaggatttcagcatatgaattctggggcatacaaacattcagtccacaacagatttatttctacattgaatgaagttgaatctggtgaaggttctttattttatacgaatctaggaacatactttgcatgagatacatatatgccatatcccaacaagcagcatttacctaacctgtgagctcgttacttccagtcctaaaccaagagacttcaactattaattcaacaagtccaaaattactttgaagattatattatttttcaccaaatatatacaaatcaaattgggcttctcagattagaatcaattttattctaaggataagtctttccttgctgcctttgatttaaaaagctgaaacaaattttggttttcaagtgaataatttttaaatgaaaagcacccacagttaagaggatttctcctctctctgtctcttaattgcaaattctgccattttcaatggagaatggctgatttgatcatgttcataatgattttatgcattttctttgacaggatggacgggcggcatcatcaattctggttggtgctatgttcattttctgtaatctctactctactcctggcccagccattcgattgctatatgcaaagcgaccaggaattggactttcaccatcccataggaggtaaagtaagctagatgcaggctaggcacagatgtagtctaattggtatcatgtactgttttaaatctgccttacaaatcctttcataagtttcttttactttatctctgtattagtccattttaatattgctatgaagaactacttgagactgggtaatttataaagaaaaagagtttcaatggattcacagttccacatggctggggaagcctcacaatcatggtggaaggggaaggaggagcaaaggcacatcttacatggtggcggggaagagagcgtgtgcagggaaactgccctttatgaaaccatcagatctcatgagacttattcactatcatgagaacagcatgggaaaacccgcccccatgattcaattacctcccaccggatccctcccacaacacgttggggattatgggagctacaattcaagatgagatttggatggggacatagccaaaccacatcaatctgacattatcctgaactatgcaaaaactgaattggattaggatattagattgtcattcagtttgtaagcccccatacgaaaatttatgatgttaaaactagaaggaaactttaaagaatacttatatccaacttccctcattttacaggtgaggaaactgggactcaagacaggttgtgatttgcctcaggtctaatgcccagtggacagagccagaacagcattcttgatcccaagctctaagaccagtccctttttgttttattatacaggtctttattgaaaaacagcagtagctggttatacttatcactggtgatcctcctgtgggaaacctgatttaacaaagggaaatgcaaaaatacatagagaataaagcgttttaaaattcactttttcatgtaactctgatatagaaataaaagattacaaaagataatctgaaaaatggaataaaaaagaaaactgtttttagataacattgatttttcttttatcacaatttcttcatttttttaaaaactacatctccttaattttttggattaaaagtgcttctgatgataaaattctaaaatttatccaaagccaaattttagctgataaattggatctgctagataaaataggaatagatgttcaaatattgaagtactataaaattcccataagctttttgatttaataaataccccagtatcagttcattggggaagtacagcaatctcagtagataaaatgtttcctaaattattgatcgcattatcttttgctagttaatatttaagaaattgatagaataagtttttattataacagtaatttgcaagaagaatcttcatagcaaatattgattgcttgcttctcctgatgtgatgggccccaagagagtgccaaccttctgtttcagatacctgggctatatgtgtgacctactggcagacaagccctaccgccctcacttcaagcctctcacaattaagtcgatcactgtcagtccaataccctttttcaacaaacagaggaatggatgtcgcccttactgtgatgtactcattggagaaaccaaaatatattcgacttgcacagattttgaacgaatgaagtaagtcatgatactttacttcttcctatgtacttctcaattctcatgtaaatgagcaggaatgagttgaatcatattcttcctgcaagactatatcattgtgaaatagctgatatataaaaaatgttcaacatcagtggtaatcatagaaaagtacaagtaaatcaggggatgttatggccctttttcaaatgaaaccatgatataggctaagggactagcataagctgtatacaggattaagaccaaggggaacatgggacacctggtcattgaagaaggagatggccttgatgggattaggtgagggtaatggaagaatcactgatgaatgaggtttctaagtgagcaactaggtagacggtgatgtaattaaagaagttacagaatccataataaagagcaggtgccagtgggtggtcataggggatgtggagagaagggagtgggtggtaacataacatgaaattagttaggaatagattgaatttgaggactggcatccaagactttcacagagcaagacatttctgtttgtatcctgatctccagtggattttttgttccctttatctctgcttttagtattaatttaaagttaagaaaaggcaaatacatgggggctagatgcatttgaggaaaatgagatctgcaaagcaggcatgggcaattgcagtccagatgggatgcagagagggggcctggcattagaccagcaccatcctactgcacaaccagttggcactggctgcactcctgtttttgctcaagataggaaatagtttctgggtccgggcctgggcgaacagtcctctgggccagagccatagagaactatacctgtgtctgtgtgattgtaccagattggactctctttcaatgtatattttggtctgtgtttacagagaatatcgtgtccaagatggaaaaatcttcattcccttgaacatcactgtgcaaggagacgtggttgtttccatgtatcacttgaggtcaaccattgggagccggctacaggctaaggtatggtttttggaagaatcatggcataagttcatctgagtcttcaataggagtatttctgaatcttttctccccatcactttgggcttgagtcacttgtagttttagaatgaaaaagagcgtttaaagattgcttagctcacctccttcatcttacaggggaggaactgagactcaaagaggttgtgacttgcccaaagtccttggcatgatgtccgtgccagaggatgacagccctggaactcttagcaaaccatactctttagaagcctgtgcttttcttatagtgccccatttggatcagtgtaagggaagagatttctactgaggatgtggaattaagggattgtattttttcaattttaaaaaattgagataaaaccacataacataaaagtcacccttttaaagtgtacaatgcagttgtttttagtctattcaaaaggttgtgcaaacatcaccactaattccagaacattttcatcactcacaaaagataccctgtacctatagcagtcacttcctattccctctcctccatctcctggtaaccactgatctacattctgcctctatggatttgtctatttgggacattttatttaatggaatcatacaatatgtggccttttgaggcttccttctctcacttagaatgtttttgaagcttattgtgttatagcatgtgtcagtacttcattatcttatatggccaaatattattccattgtaatgtcacaatgtattaatcttagttgataatctcagttaataatcatcagttggtgaacatttgggatattgccattttttgctattaggaataatgtggcaagtaattgtgttttgattcatcacatattggctaagtgagtgctttgtgccagccattgctgaggtttttaggattgacaagagtaagactatgtctctgcctttaagggactcaatttcacaagggaaatccatgcaagtacaaatatgcatgataccatattagagggaggatgaggtgttataatgggagcagtttgttttagccagcagtggcctagaaaggctacagagagaatatgaacttttaagacatgccctaaaggatgagttcattgggttggaacagggcatcctgggtagaaggaatgcaatgagtcgaagtatgcctgtgtgcaagaacatagtatttagcggatgagaaaatggtttgccaaggcagagttcaagtagaggagaggctggaaatgaagctgagcctattctaactggggaggtcatttaatatccatagtaaacacaaattcagatattgaaacagttgaaggtgcatgtctccccaaaatctaatcttttgatcagattcccttttcgctgattgattgtaatgtgcttctctcatgtatttttaggtgaccaacacacagatattccagcttcagtttcacactggattcataccactggacacaacagttttaaagttcaccaagtaagtactggttgggccaaaagtctatttgaatcaaattagctgtgaagtgctgaggctcaatggcaccaggctgtagcataccctggaatcctgtgctgctgaactactgagtgtcactcagtagcacagagaggctgtgggcattctaaagctttcagttgaatatgatttatcttcagaagtacaaagggaccaaagacttcaaacagaaagttctaaaattctatgtgagggaataagggtaaacaaagcgggacaaagtatcactgcttttgatcctttgcatctgtgtatccccttgtgttttccagtggggatggcagtttaatcagtggtatggtatcagcaatgatgcatcagaatagaagccccgctatagcactgaagcaggcttctggaggacctttctgcaccgacattaacctatctcatagtgtggtctaggtgaacgcagttgtgggggtggctagagccgggatggagttgctggggccaggataggagtagatgttcaagggctcaggacagtggctgtgggcctattgcactattttaataatggattttgccgtgccagtcacatcagccctgctttccagaatgcttttacatgcagtagcattcaaatttgttgagcaggcattattctcctcttttctctagattaggaaactgaagctcagaaaagtaaagtaacttatctggttatgactgagtcttttttagaaatgagacttagatttaacctaagagtcaacctaagatgacttctgtgccaaacatcataccagttccattgtttttcactgaatttatcttttttaaatccctatttaggcctgagttagatgcatgtgatgtaccagaaaaatatcctcagctatttcaggtgacactggatgtagaactacagccccatgacaaagtaatagacttaactccaccatgggaacattactgcacaaaagatgtcaatcccagcatcctcttctcttctcaccaggaacatcaagatacgctggccttaggaggtatgagtcacctgatggttttgtttttcaggatgaagcctctctgttatttatttcctgtgtctcattgatgctacatggtctttttgtcttgcaggacaggctccaatagatatccctccagacaaccccaggcattacggacaaagtggtttctttgcctctctctgttggcaaggtatttacaagtgtttctttaagtcacatggtttgatgattatgtatttcttctgtaaagatgttggccctagaagcagactacattaaagcagcacttagaggtcattcaatccaggcacacggactcccacctgtaagcccagcactttggaaggccaggataggaaggccaggagttcaagaccagctcaggcaatatagtgagaccctatctcaacaaaaaattttaaaaaattaggtgggagtggtggcaaatgcctgtagtcctagctatgtcagaggctaaggcaggaagactgcttgagcccaggagttcaaggttgcagtgagctatgattgcgccactgcactgcattctgggtgacagagcaaaactccatctctaaaaaattttttaaaagacatcattcaagtttacatccttccaattcattcccttttcaaatcaggcaacttccctactttcaactcagtagatgctcttagactgatgcaaaaggccattttaaactgaattctcccttctctctgctgtgtttttggtcacgtcattcctggactgacaaataagtgtgatttgtttatgatctccctttagactgctgcctctgtaatgagattaacacaggattctatcttccgctgtcaactaaatattataaaaatatcaaatcagcattccccccagggagccttaaccactagcagggcagaactgagcttaccctgctgcagagaaagcaaacacttggcctgtatatctctgctcttgctttaacagccataccagaaataagggctcgattactaggttcttttctctcaaacctggagatattttcagaatcctcctcaatataacacttccagctgctgccagcagtagcctgacgttggcatcctaatcaatacccattggctatccttgctttagagctggctgaggctaactgtgagattcagtgtagacgtgggtagtcagtgtttgggtatgaaaggcatgggaaactggctatggtatggtttatctgaaattatcctgattgaccttcctctgttgtgtgaatgtaagataatattcccatcgcctgcaggcttcagtttgatgaaaaagttgttcataaaattccgttgaattgaaagactcactttcagaattttctttcgagaaatggaactagcaaatcctcaaatttggaaaacccagtggtatctggacagtaggtagatttcttatcccctgttggcctttcttacctcttattttcctcacagcgagggcttttaatacaacttcactctttcctctccactgtcattttagcaaataatttagagataattcctgtagactctgaaataggttttagtatagatgcacagtctcttgtctgaacctctcagagccaggtatgtttaggaatgcagaactttttggattttagaaggatgatatgctacataaagtgatgtaacttgacatcccaagtgatatctcagataataacctataatcaaacatattaatatttctgcagtagaacatataaacaatagccctaagtgagataaatgaagactataagtatcttcatattcacgtctgtcagttttccaccaactgaattcatgccaaacttaggaaaatcttttccttttcatagcttattacattttataatttggaataaaggatgtggatccatacttgacttggaatgtgggtctatctggcattaaatatcaaatttttgtgggaagatctatctcagggagggcttagaaggtcactccttccccagaggaggcctctttcctgctgctcattttgtgctgaaagtacccctttcaagctggtataaggacctttcacagcagagctcttcttttcactttttaaatgtgtggttcacttctgctccagactgttagagaagggatttgcttttggctacaggacacatggagaagtaaagacagtgagaagtgtcagcaaatgactagcagataatggtttgtactaccctccccggccaaagcacctagcatagtgcctgaaaaaaaaaatcaacacttaggtactacttactattgattggagtgatttataatatcatctcatgtatttctcacagtagcctgtgagttaggtactatttatttatttagacacagtttcactctgtagcccaggctggagtacaatggcatgatcttggctcattgcaacctctacctcccgggttcaagcaattctcatgcctcagcctcccgagtagctgggattacaggcacacgccaccatgtgcagctaatttttgtattattagtagagatggggttttcaccatgttggccaagctggtttcaaactccttacctcaagtgatcctatctcagcctcctaaagtgctgggattacaggtgtgaaccaccacgcccggccgttaggtacaatttgttatccccactttgctgaggaggaaaccaaggcacagagaagtaaagtaacttgcccagtgtcatagagccagtgagtagtgaagctgagattcagtcctaggctggctccagagttcctgctccttacccctatgctctactgcctctcagatgctcaacaagtggtagttgaatgtaacgtgaaatacatcaagtgttccactgattagggtctaaaaacactgtttgctcagggctgaatccttctgtctttctggaattatatacatatattataacaaaaaccaacaatgctgtggtcagcaactaatctcttatggtatactggccttcctcagatcagaaatcggagaagtcattctgtgaggaggaccacgctgccctagtgaatcaggaaagtgagcaatcagatgatgaacttctgacactttccagtccgcatggcaatgccaatggtgacaagcctcatggagtcaagaagcccagcaaaaagcagcaggagccagcagcccctccaccccctgaggatgtggaccttttgggcctggaagggtctgcaatgagtaacagcttctctccgccagcggctcctcccaccaattctgaactactgagtgacctgtttgggggtggaggtgcagctggtcccacccaggctggacagtcaggagtggaagatgtgtttcatcctagtggacctgcgtctacccagtcaacaccacgccgctctgccacctccacctctgcgtctccaaccctaagagtgggagaaggtaattttttctatgttgcactgtgcctctcagatttgaattctaacctttgggccaaataggtggaattgaactttcctaataagctagacttttctgatttcactgtaagtcctttagaggaggtctgtatctttatttaaattgagagcgtaagagaaaatagaaatattgtccatttgggtagcacactaaggtagtgtaagagtggacgtttgagcttcacactcttacttctaattttctttgtttagcacttcaacccctgagctgcattagtctgcttaaacatactgattgatgaattattattgataaaaatagctaatatttatgaggtatttactatttgccagacatggaatttaatactaaacattatttaattcttacagaaactcaataaataagggctatttttatccccattttatagttgaggaaatggaagcatagaattaaatcagtagcataggtttatatgactagtaattgataaggccagtgtccaaacctaggttatttgactctagggctttccctctgttttcctataacggcttcctgaagttatagttttctgaatatatgtgggctatccagagaagtgtttggttatttgaaaatatgtttaagtgactcatgccggaagcacagcttcctagaacagagcagttggtactaggtaaggagtttgagccccttgaggctctgttagtttcactgtctcattgccagagactcaaaccttctactatgagtcatctaggattttttgacatttataagacagtgtagttgggtaagcagagatccagcacagctcctgaagaacccactcaaattagctgccccttggtcctgtcaccattaaccaagatgacttcacattaggaagggtaaagagaaatgtctcaactcttcaggcctatagtatcctataggaacattttttttccccaagcgtatccttcccagaaggctctgggctggtcttgacttgtgatagttcagctggaggcatccttcatgagtgtgggtctcagaattacagagtattggtgttgaggctcaagctccaatgttagctattggtggacccaggatgtgaactcaggtgccctgaatcctatgccaatgctatttcatctgtacttcacttccttccatacagttttaacttgccaaagtgaaaaaaagctctgtcaggaaaacagtttccaagatccaagatatcagtactcgataattgcattttaagactgtgcacctggtgtgactctcatgatttcattcatcatagtttcaggcagctagtggaattccagtgccagaaggggccttagacatcagttaattctctgcctcatgttatagacaatgaaactgaggcttagatgtattgattgacctgtctgaggatacccactggattagtggcatacccaggtctagaatgcaagtattctatccccccaagaggaagtagaaagaacaccaagtctagagttaaagacctggatttgaatcccaggacttaactgtctgtgtaacattattgaaaaatcttctcagttgtaaaatggggataatagttacatattagcattgttgcaaagactaaattttgagctcttgtcttgtggtgttgggcagttttagttattggagaatgcccctagtttaacataaattgatattttaaatgtactgagtatggtaagaagggataaggctagataacaaataaatcctgctcttaaaaccgaggtgggatatatggcttaatacgttttcagctaagacttcattggcataatgctctcctaacaactgctgggcagattagccttgtgtagcagcaatggtatcgactgtagttcatccaacaggtaagtccagactactcctttgtccacaaagataggaaattcttggagtccactgttagccctacaggaagtgacaattctgtgacatttagtgaatgaactcatgggacaaataaatatattttcccattgttttctaggtgccacctttgacccatttggagcaccttctaaaccatcaggtcaggatttgctgggttcttttctgaacacatccagtgcttccagtgacccctttctccagccaacaagaagtccttcgcccacagtacatggtaaggaaatattttatattgtgttcagtggaacatagttttctgcaagatatcagtaagtgctcatatataaaagcaccctgtgggtgcttttttgataaaagcttcctcacacatctctgtttttgaaattaacaactcaccttaacatatcaaaatctctgggctgtcttacaggacagaaacctgcttaactttgttttgctctgctttcctatttgactatggtatccttttttgcattagagctacatggacagaatcataaatgacccttgattgtaggacatatgattattttatgtaccaataagaaagaaaaaaacactgccactatgaaatgattggaagatacttcttggttagagaaatctttgaaatgtgggaaaatatgtcttaaataaataaaatatgttagtagtccacaaaattggtattccaaagaacaaagtttgggatatgatagccactagttacgtgtggctgttgatgactctacatgtggctagtctgatttgagatacactccaagtataaaatacataccagatttcaaaacttagtacaaaaagggcatgtgaaacatctcatcaatatttttatattgatcatttattaacataatatattgaacatactgggttaaataaactatattattaaaaataatttcaatagtgtctttttactttttaaaatgtgactgctaggaaatataaaattacatatgtggcccaaattatatttctatgttagagacttaggttgtatagaaagagtaataataatcacatccatttataaaagtgtgtcacttaggtaacattgattaaaaccggaggtctgcagtgagggataaataactttgagccagagagttgtagctcattcctgatgtcgaagtctattgaacattattggccacaacctagaaggtgacgtattgttgaaggcatcctgagcttgcttggagaatgcagtccagtcatcagttgactttgggaaaccatgccaatgcaaaaggaagatgacttttgcaacactggtgaaactgaaacttgactaaaaaagattccaggaacaacttttgtggttcatttccaactagtctttaatctcaaactatttgaagtgcatcctcaggacaatatacaagaaattcccctcttacctctgagtcatgctcacttgagagagtctcctgattggatgttgactacctgtaggagaaaagatgcaggaatgtagagtagagttggttttctcactcatttaaaatgttaagtcatgtcattgctctgctcaaaatgcctccccattttactcagcatgaaaaccaaagtccttgaaatggcctgtgtagcctctgtatgctctagcatctcagtgcccgtgacctcatttcccattctttcccactttactctctgcattccagctgtactggcctctttgctgttgcactggctgtttcctctgcctcatactcttccccaggcatctgcatggctaagtccttcacctccttcaagtgtttgctcaaatgtcaccttctcagtggagtctactctgattcctccgtttcaaattgcaactcgtctccctgccctactctacattcccctttctgttgtgcttagtaacttccagtatatgcagtaattaacttatgtgttacatttttttgtcatctctctctctctattagaacatgaattccacaaaggcagggaattttgttttgttcattaatgcatccatagtgcctaaaagaattaccggcacatggtagctgctatctatctttccaatattaaatataaaatgaattaactcatttttcccatcaaagtttctttgatgcacagtgatagtgtcataaggctatatgttttcctgattttaatactttgaaattattgttttaataagagtactaccctttgtgtcccatggacgtgggtgttcatacttggcagcttggcagttttggatccagttttctgtttctgatgagctgattagaacatggtgtttataacccagtttaggccagttagtactcctttgttttgtggttacatttctcattttggtctgtattgtactagcgagtggaaagaattttctcctctccttgttgggaaagcaatgatcatttcactgttactgaatcaactccccgtcttcacataggacagaatataggtgacactcagatgtctgctttgggaggtcagacatcctcagggtacttcccccgggtttctgcaaggcgtcgccaatctctcatgaaaataaaaaaaatactgcctttgggctcaacaaatatttattgaacatctattctgaagagaataatcacttgggacatgatgttggaagaacaaataaataatcataataaaaggcaaaatagagactaaaatattaggtaattacctttttgaaaaaatatattcctgtttctctaacagaccttaagtttcttgaggatagataatgcatctttcagtctctgtcccctgatgtggtgccttgcatgtggtaggtagtcataagggtttgtgggtttgattagcaacagggttgaagttctgatacctacttctgcgtcttaattggatgtaagactaggatcagagcttaaaggaaatcagatagaacgtactagcaaaaccgtctaacttccacctcagtggaatgggttactgtgtaaaaatagaagggataaatagaaaagaaagaattattattgctgataatggcatatcctttttaacttaatgatgggaaggtactagatgacttggttggtactaagtaaacaaaacaaggaaataaaaggtttggaatgctaatcttgatgccttctggtggtgatggggtgtgtgtgtgcgtgtgtgtgtgttttaaatcccagttgcaatgtcagtttagtatttgcattttaataattgatttgtgtgggcaaaacctagaggtgcctcagaaagaaattcttcatcatggcatcctgtttcctatatagattttatagatgtgtaaaaaacttactacgcacatgtattcctctagtacacctgattccttttagccaaatatttcttttaaattatatgtttggaactttgagggggggtcagaatgatttattttgaagctgtaatgagtttattttgagtaccatagacacatccctgacaaccagcatagtgatgatgtatagccagtgcccagtacatgttctgcatgactcattattctcaactcatgtcacagcagaggagaaaacaaaatgtcagttttgagtggattatgcttctatacttaatgcttagcaaaggtaaactgagcttaaggtgttttcccccttttcttattgcacactgactctgtgttaaatttagaggtgggacacacacacataagatagttctttcctgacttcgagggactgacaattgaatggagacagacacatgctcaatgataactcaaagcgtgtggatatggaggtaaaaccaaagtgagacaaagaaggagcagagacaaataatatgtcgtttctgtcaagcctcatgtgaacaaccagaggtgaaggcagaacatattgaatgttgcagagtgtggcaagaactcagaaggaggagtggatatcttgggatcttgctggggccatgcaggcttcagggatggaatggcattatcctgtgtgaactcagaaaagtgggttctgagctctcttgttctcattctttttcttttccccatttgcagcttctagtacgcctgctgtgaacattcagccagatgtttctggaggttgggactggcatgctaaaccaggtaaaagcaggttattttctgtacacatttatataattgcaaaagcataatccttacccaagatgaagtgagtactcacagagtattgtggcctacctgtgtaatttgtgtcactttttcctaaagattcatattctagaagagcttttcccaatgcacttgatgacatgatagtgctacttatcatacaccatttaacttttctaaatttcatttgctgaatgtcttatcttgacaatagaatcagacggatataaatatatatcaaactctatcacttagaaactcttgggtttttttggcaagtctgagcctcagttttcttatctgaacaatggggataataattttggtcccacatagttgtgtaagtttaaataaaaaaaacttatataagaatttctggcacagtgtagatgctgacaaatgtgaatattcttccttctttacaaagtacttacttcagggtgggatttgtctgtcatcaacaaggtctcctcctcatgaccactatggcatttatggagctgtcttgtgtgactgctcctgacattgagcaagttaagtgcacgcgtgcacatacaaacacatacacaatgggcttatcacaacaactttctgaagcagttgctgtttcctttttttattgtagcaaccccttccccacaacgtaacatttaccctgccaataatttccaagtatacaatacagtattatcagctacatgcactttgttgtgcaacagatccccagaacgaacccacctccccactgaccttctcacataactgaaactctacactcactaaataactccctacctctgcctccaccagcccctggccaccacccttctacatgagtttgactactttatatacctcccataagtagaatcatacagcatttgacttttgtggctggcttatttcacttagtataatatcctcaaggttcatctgtgttgtaacatgtgacaggatttccttctgtttttaatttaaaaattttttttggctggggcgtggtggctcacgcttataatcccagcactttgggaggctgatgtgggaggatcccttgaggccaggagttcatgaccagtccgggcaacatggcaaaaccccatctctacaaaaatacaaaagttagccaggtatggtggtgtgtgcctgtagtcccagctacttgggaggctgagatgggagaattacttaggcccaggaggttgaggctgcagtgagccgagatcacaccactgcactccagcctcggtgacagagtgagaaacctgtctcaaaaaaagatttttctttaaattgacagataaaattgtatgtatttgtcgtgtacaatatgatgttttgaagtacacatacactgtgatatggttaaatgtagctaattaacaaatgcatttcctcacatggttatcatttttgtggtgagaacatttaacatccattctctttggatttttcaagaatgtagtagatcatcattaactagagtcactatgctgtacaatggatctcttgacttattcctcctttctagctgtaataatatatcctttaaccaatgcctcctcatccctgccctacctccaaccaccccagcacctggtaaccaccattctactctttatttctatgagaccaacttttttagcttccacatgtgaatgagaacatgcagtatttgtctttctgtgcctggcttatttcacgtaacataatgctctctaggtttatccatgtcatctcaaatgataggaattcttcctttttatggctcaatagtattctattgtgtatatacaccatattttatttatccattcatccattaatggacacttaggttgattccatatcttggctgttgtgaatagtgctgcaataagcatgggagtgcagatatctctttgacatactgacttgatttcctttggatatatacccagtagcaggattgataaatcatatggcagttctatttttaatattttaaggaatctccaaattgtttcccataatggctgtactaatttacattcccaccaactgtgtccttttttctctacatccttgccaacatgttttttgttttttttaatagcaattctgacaggagtgaggtgatatgtcattttggttttgatttgcatttctatgatgattagtgttgttaggatttttttatacatctgttggttttatacgtctgttggttttcttctggtattcatctgtatgttttcttctggtaattccatagttttgggtcttacatttaaatctttaatggattttgagctgatttttttatatggtgagagataagagtctttttaccctgttgccttcttattctgttgattgttaccttccctgaacagcagtttttagcttgacaattgtcccatttgtttttcttttgttgcctgtgatgttggtttcatattatttctcttttttaaaactaatggtaaaatgctgaagctcaaagatgttaagcaagattcccacggtcactcaggaattggcaaagccagaatccagatccagacctaacttcgaatcttataggaaagagtgaagtcaggtgacatgaggacctggaaataaaacaaacactggaaataatagttcacacttgtggcctggaaacagcatttgtcttttctgtggtctgtccttgttcaaggccaccattcacccaggtcagggaaacagggtctagcaacttcttagacattttcaaaccctgtcctaatttgcctaggagacaaataaacagtaactctggaattctgaatttcacaattcagcctcaaacaactaactcattttcaatgaccttatttccttttcaggaggctttggaatgggaagcaagtcagctgccaccagcccaaccggatcctcgcatggtactcccacccatcaaagcaaaccccagactctggatccttttgccgaccttgggacactaggtacaaactcagaagatcaagatacaaataacatttatttatagctataaagcctcaaatctcagtctttggtgttacagcaagctggtattgtcacctggaacctcaaatagtgtgtattcttaagctatcctctgaaacctgagattggctttttaaaaaaggaaagcgataatcagatgtggggttagaaatcatctttattgattcatttctccagtgcctaattctggatgtgtagcatgaataaagttagagctttcaggggctcatggcaacagagtttggctgcgcaaaagtaatgcgtagggaaacagtatgagacagggctggtcagatggatttgtgccacatgatgccaaccttgcagaacactaactgtgatgcggtgatgttacctgtgagatcttcacaccgttccccttctctccattaactgtggtgctctccggtcaatttgtaaaattctatacagaaaatagactcaagtatcgtatttccagaatattttcaccatatgttaatagatgttacaggataagtgttctgagagcaggtgagattgggaagcactggtttcagtggattttgattaccactaagagggacacagtatccagagttctcaaactgatttcaccaaggagcctgttttcaaggaggggttcactggactactatgttctgaaacattttcttcctcctttttccttcctcctctagggcagtgcagatttgttaaataagggtggggtagccctgacacaaaggtttatcttggctatattgatagtctgtgatctcagaaagccctactgaggcatttagagccagatggagggaatgtgagcctggctaccgttgttgtctgtaactagtgtcagcatctttatcttccattctgtactatttagatgtttttcccttttaagaactctcaaaattattttatgcagtcattttcttctccacctttctttgtatcttactgaaaatttcaaattttaaagtaatattatatcagatgaaattttacttcaataaaatctcatttattatttatttttaatgcatttaatgcattgattcatccaacaagtatttaaggcacttttgtgccttctaggtgctaggactgttttagtaaaaaaaataaccaaacaaaacaaaactcctgccttaataaaacttacattatagaaggggaatcaaataataaattaacaaatatataatgtcaaataatgaaaacaataaaaataacagttaatagttattggggccttactatgtgccaggcactacttaaagtgttttacatatatcatttcatttaatcttcctcataatcttttgaagtagtgactgttataatcctcgttttacagatgaggaaacagggacacaacaggttaagtaacatgcacaaatcacaagctttcaacaccaagaagtctagctctggagcttgcactcataaaaggtttagaggttgatgtagctgagtgtgggaaggggtatcagttcagttcatccagtcaatggttttctacccttgagcattaattccctcatttcacaggtatttttgagtacttattatgtggtaggcattcaggatgtaataaagaatcaaagctgatgatattcctgttctttgaaacttgcactacagtgggaggaagaaactttaatcaaatgtaaaatatccgctactgtaggggctacacaagatggagcattttttaaaaagctccccaggtaattctaatgcacaatcaaggttgagaactactgctttgcttttaatgaggactgcagtggtctctggatttagctaccactttgtatttctgtaagttctctgcttcaatagcattaacaattagacttgctgagcatggggagaaaatattctagaagggtagacatcagagagtcctgcaatgttgatgagccccatgagtgcggggtcagcgtctgctttttcaccactgtatctgcagcctggcatctagaggatgctcagtagtgtttcctaaattaatgaataactggcagtgtggtaggcatatggcaaggttttcttagttctttaggcttttctgtatttaccaaattttaaaataaaaaaaacacatatgttcagaacagagtaagcttccttaaatataaaatgaaaccccagtgtagaatgaataccaagttttaggtgtatgttcccgtgctattggcaggagggctctgggacataggaagaaggaattcatgctgctagttatggaatgagtggggcaatgccaagcttgaagacaagccctgtcattacattttcctatcaccaagtgtttattgagccctgaagatgtaccaggcatgtgcttattagcatatgagcttacattattttataatatataacgtctctttgtttgcttaattgtgtaatactttcctatagttgttgtgtctttacagtatacctgtgatatagacatagttttgattaaacagatgaagaaactcaggctcaaaggagtgagttttttttacccagctttagaagagcaaagattctctatatcctgttttcagctatattcttagtgcccagcatagtacatgacacttggtaatgctcatcaaatagtggtgaattagtgtatatatgtatgaatgaatgaagaacgaatgcaagaatgaatgacagagctgagactcaaactcagattgatggtaagtccagtgatcatgatgcatttccagcagggaaggaaagtggagccccaggatcagaatagggaaagtatctatagaaagaagagatagtaagggatgagttgtagtgaaaggcttagcaattaggagaggaattaaggattactgagtgcagtaaatgaacatgacatttggaggtaggatgcacatagtctaatcccagctccattaattggctgtgtgatcatgagtatatcaggaaacctctctgagccttaatttccttatttttaaagtggagccagtgatactacttacttcctaagagtgttgtgtagatctgagcagtaatgtacataaacacattttgttaactctaaagagctatataaatattagttattttattattgttactttagacttattacatgaaagggtctttggacatcagcacatttcagttttctcattttacctctttaaatgcaagccacagctggttttcatattttggacatagcccagcttgtatgcaatgagtgcttaaaagtttggagattatggaatcaagattctacttaaattcctggcacaaaataacatcattttcaaagcttgaataagatcctttgtcctgtttaaagttatcagaatgttgactgtttttgctctccttcagtgaaatgcaagtagtatgaagttaaaacctacttgtgaaatttcaaaacatctttatttactcttgggcactaaccatgctttataacaaaaaatgatgaatcctaataattgaagtttaagtagcaccttaatgagtggactgttttattccccattcttgtcatttggtggttttttttaaattttattctagtgaagaaacagaatctgctcagaagatggaagggtggggaaggatggcacagtgggaagagccagggttcttttgacctggaggcaaagatccagaatcaagtctcggctcagctacttgctgtgtgcctctgagaaaaatcacttaactgctctgacctgcagtttgttcatctgaaggaaaaatgaggccattaaaacatacctagaaatgttattgtggggatgaaggaaataatatgtatgcctgcaattgctttatctatattaggaagattacttatgctgtcagtcaagggaatgactattaaagccactgcaaacagtgtcttaagacacaagagttagaggccactcaaaatagttttaccttctttatctctttttttctttaggtagttcttcctttgccagcaaacccaccacaccaactggattgggtggaggattcccgcctctcagctcgccacagaaggcgtctccccagcctatgggtggcgggtggcagcagggaggtgcctacaactggcagcagccacagcctaagcctcagcccagcatgccccactcctctccccagaaccgacccaactacaacgtgagcttctcagccatgcctgggggccagaacgaacgtgggaaaggatcaagtaatttgggtaaggataatggtatgggacctagctatggggcagcctgtctatgttgtcatactgcctgaatgtgtctctctgaaggtgacagtattttctgggtagtttcaattcagtagtttctgagggaatcttatagttgtagagataaaacatgattcctacccccaacgctgtacctggaggctcctaggttgactatgctcctaacttttataccattttgtgaccgtgggctcacttggctgtttatctccagactggaaccagatggagggcagggactgtgtcttagttgccatggtatcattagcacctagcatagtgcttggcatagggtaggcactaaatgaatgttgaagggatatgagtggagaggtagatggatcttaaagctgttattcctttggaagaggaagtggaagaaaaagttggggaatctttcaagcacattggtcatatttgccctttggtcccagttggtggactgcatgtgtcttggaaaacttggtctttcttatgctctgcttggtggattcctgagatcagcggggtacctatgatggtgccaacacctgaggctggaggatactctggataggatcttgacaatgaatgaaaagtaatatttttgcataggaaggatggttagatttgagtttattaaaagcctattttggtacattttatatttcagctgattttgtcagaccctccaatgaagtacataggaacatggtgagggaagaggcctttctctctatggaacatggaaaggcaattcttatgctcttcctaatagctgtagctaacatttattgagtccttactgtatggcaggtgctatcctaagcatttttcatgtacaggcatccccctttatttgtggttttatttgcagtttcagttacctgaggtcaactgcagtctgaaaatattaaatggaaaattccaggaataagcaattcatacatttcaaattgtgcactattatgagtagcgtgatgaaacctcgcactgtcttactccatcctgcctaggatgtgaagcatccctctgtctagcacatctatgttgtattctctacccacccattacttacttagtagccatctcggttatcagatcaaaaaaaagagtactgtatatatagggtctggtactatctgcagttttaggtgtccactgggggtcttggaacataccgcctgtgaataagtggagggactcctgtattatttcttataatcttcaaaaccaaccgcatatcataggaagctgtgacacagatcgatgaagtaatttcctaagtttatacagcttataagcgacagagccaggattcgaaccctggcaatctggctccagaacccctgcccttcattgctaccctctactggctagaacacaggtgctcacaacaccagcatgttaggaattcagttgtcggggatatgtaacatcatgtttgttcttgactagcagggatatttcctggacaattccatagagtcatgccaattcccctccatttttgagtagatagatgtggggcgagtgacttcaatcagcaaatacttatggagcatcttcagtgtagaaaacattgaggatgcagcagggaacaagaaacaaaatccctagtttcagagcacttacatttcagtgtgtgcaaaaacaggtatgtgtatgtcttacagtatagagatagcaaatggttttcaactcaaaaactgattttggttgatttgaatcgactgtatggactgttatgttttggttctattttgttttaacaagcatttagatagccaggcactgttctaagcattttaaatgttaactaattcattttcaaaacaagtccataaggtgagtaatattcctaacaccatccccattttatggatgaggaagttgaggagtagagataataagtaacttgcctagattacatcactaataagtggcagagctggaatgcaaacccagggagttggggtccaaagtctttgttcctagccaccatgctcggctgcctctccaaacaaattgagaaagattaagaggctacaaccagacttggagagaaagagcaaagtgattgactaaaatatcaacagaatatgggcagagaagtggtagcatgcatgaatttcaagtaccaaaccgagatcccagtgccaacactgatatgagttagttataatctggagggataatgagtatcctcatctaaagagaaggtacagtggaaatggaattggatttggcttcatgatccagcctccagttttaaccttgccacatatatgattctggacaggttcattttcttcatctgtagaatggatgcaacagtctcttaccctactcacagggtaagcaagcatgagggttaaggactgaatgcatattaaaaacaccttgaagactccagatgctgtgagataatgatacagcattatgtttaagaatgaaaactgtaatgattttcaaaaattatattgcagaagggaaacaaaaagcagctgattttgaagacctactctctggtcaaggtttcaatgctcacaaagacaaaaaggggcctcggacaatagctgagatgagaaaggaggaaatggccaaggaaatggatcctgagaaattaaaggtgagtgaggcccctgacgcagcttgattatcctatatgacaaagtcatgtgataaagtcatgtgtatggagctatcgccatgagagtaacctattgtcttagcccattcaggctgctataacaaaataccataaactaggtggcttataaacaacaggattttttttttctcatagttaatgaaggctgggaagtccaagatcaaggtgccagccattttggtgtctggtgagggccatcttcctggttcatggatggtggtcttttccctgtgtcctcataggcagaagaaagaggtcttgctcaggcctctttcataaggacactaatcccatttataagaggtctgtctcatgaactaatcacctcccaataggaagccctaacctcctaataccatcacctctggagttagaatttcaacatagcaattttggggggacacatacattcagaccatatcacctataaaaggcatgatagtagatttctggtggccactctatttcatttggtctttgcagctgtgatttgagtacagctgtgccctttaatagcaaagtagctctgaggaggttgcacacactgtttactttctttaataaaataaatgttattccatgatatggcaatatagatttcttttgtttgcctgttcaaatgagcagtggcactttctaagaggtgattttgttattcagatggcattcacattctaaagatgagtcattagaatttgctggtaagaagaatgcattatttatgttttctctttctgctttgagagcttttttattaaaccagattgactgaagcccccaggatcttttctctaccgatagagaaatatttatgtacctgagacttaccaattcctgcaacattagacctggagctttggaaagtagaggagagaaaggctgagggaagtgtggctcctgtcttccccattgtctccctctacttttaaccaaagcagttccacttttctctctttctgattctggaggtttaggtaaaattagatttgaggtttttcctcaaatcaaatcaacatacttttttcctcaaatcaacatactgttttagcatgtttcagcattttgtttttttaagtttgcaattcagcgaatctaacccctttgtttcacagctgaaaaaaaaccacataacttcatagatgaagatgttgtatggacaggcggatgcggattagctgggaaacagagggtggttctgttgatgagtggtatgaggtctggaagagtttgtaaagatcaagagaattggaatgctcttcacagatggagaggttgagttcctatgtgacaaaatactaaatatgctgatactacaacaaactgaaagaggaggatgtaatctgtctctgtattaaagcatctgcaaaaccagtacttaaacagcaagtcaatcttaacacattctgaaaacatataccaccgttctgtataatttcctgacagatttgttgcagatgtatataatatacatctaatataacttagattctttgatacattttttagtacaatgtagggtctttcatttgcatgtttttcactccacccaatgtcacagaagcttaatatttcttccaaaaactttgtgcttcatctcaataaccgttgttcattaggcaaattcggacagtttcctataaaagaaagctgtttatttcatttaaaccatgtttgattatttaattggtacagggtatgtaattgtttgggagggtagctgtcattaatgtgactaaaccattcatccagcaacactcacttagctgaactcctgttaggtactcaatgctgatacagttttatgatccctctgacttaatcacctcatttgttcaaactgtgaatgttcatagttcaaataaatggctaaatgggtcaattcacgtaacaagcctttttgagctctgttctgcaccaggttacttatttggttccgagatacagtgatatataagaaataatacttttcctcaaacagctctgcctaatggcaggcaaagagaaacacacaattacaataaagtgtggtacatattatggtagaaatatgtttaaggtagagtggcccagagaagtttggcccttttttaaggtttacttatttagtgcagtatctaccctcatggagtttatattgagtataactctgggggtggggatgggagagaaaggaattcaaactcgcaaagtctaacagtgtgaaatttctcagcacccttttgaaagatgatagagttaaccagggagacaaggtaggagattgaggaggagaagcattccaggtagaggaaacagcctggatcatacaggttgccctaagtgttttgatgttgctggagcagaaggggtttctagagtcctagtggaaaccttctgaactagtaagtaagcatttgaatttcttaatcccctttgtgtttacagattctggaatggattgaaggcaaagaaagaaatatcagagcccttctttccacgatgcataccgtactatgggctggggagaccaagtggaaaccagttggcatggcagacctggtaacaccagagcaggtgaagaaggtgtacaggaaggctgtcctggtggtgcacccagataaagtgggtataacctgccctgttgtgtaacttgtcaggtccttgcttcattatcttatgagtatgtgttttactttaaatgtgctggttcatatggcctatttttaataaaattaagtcaatgagctaaaatcagatatttaaacaaatagttatactttatgaaatgagaaagacgatatcaaactatatattacaggggcttatttagagagagtaagatttacccagtgattaatttttagggctcagaagtaaattgtgtctgagtacggtggctcatgcctgtaatcccagcactttggggggggcagggtaggcgaatcgctcgagccctcaagtttgagaccagcctgggcaacatgacaaaaccccgtccctacaaaaaaaataaaaaaattagctggtgtggtggcataagcctgtagtcttagccactcgggaggttgaggtaggaggatcacttgagcctgggtgatcaaggctgcagtgagctgagatcgctccactgtactccagcctgggcaacagagtgagaccctgtctccaaaaaaagaaaagaaaaagtaaattgtgtcctggcttacaatagtaaggacaggctaagagctggacagaagaaaactcctttcctttagagatacagcagtatagttagctaggatggtaatgaaaaagcttcagaatgtagttggtaaaatttgtgagaatcaataaaatattcagaatggaattaaatttgccctctcttgattattactacattgattatgtcagtttatgttttcattgaagtatatatacatctaagggctctaccttgtcagaaacttcaagtaactcatggacaaatgaaatcatcatataatacatagaaacattcagcaagaagtgagtcatcttgctgtcacatagactataccagtcatatgacatgaagctatgatcgaagtgccacttgggaacacaggcttgaatttgatgcatatgattttcatctctccacatttttttgtactagtctgaaaagaagaattaatgagaagcaatggtagtgcttgaattttgatgaatcaaaagagaaggagaaacaagagcccagaaaaatccacaaactgtattccccattatgactctcaaagaactttttagaaatgggaaaatgggagttaaaaacagtcaatagagatgggctgtcatgaacctttgtcatttggcagatacgtctggagaacagagatacgtcttgtgctgcctgataagctctctgttgtctacttcttgatggattactactacccttgtgcatttctagggggaggtcattatggggaggttatagtaatttgggtcagatatagtagattaggctgaaaaggagaaatggccaaatagaaaaacatttccattgcttagagcccatatattggcagtgaaaaatttaatattaatgaaattttggtctgtggtatctaatgtgtgtttttgttttctctacaggctactgggcaaccctatgaacaatacgcaaagatgattttcatggagctcaatgatgcctggtctgaatttgaaaaccaaggccaaaagcccttatattaatttatgagcttttccatctctgctgcagacctgtgctaatgcttagtgtgtgtcacaattctgaggttttcgcagatgaaccaaaaactccagtaacatgttttcagtactaaaccgttaagttactcatgaattaatttctcattgataaggaatgtggatgtttggtttctccaaagttcccaccataaaagatccaaagcatgagaggaacttctagtcagatgaccttgcagaaccaccgcattccaccctgccctttggggagcctactcagcattctacctggggaaatggaaaacagaggccaccacccatgaaggcataacacccatcacattgtctgagaataggattaatgagcaaaagttatgataatagagttatatgatggtttaatggtttctagatttttcttggaaagatataatttgagcagtggctttatgcagactccaagaacaaaaccaccaggtatttttttttaagtaaaaatttactaaggcctttagcataatactgtaaatgtcttttggtcaagagaactaacaaatataaaggaacttgaaatgtggggagtgataatagtccagtgattaaactacagtccagtgattaccaccaactttctgactaagctaaaaatgaatgaaaatggtggctaaagaaaatagggactctgaagatgtcgaaatctttattcctggttaggaaggtgggccgctacccttctttccctttagaaaactgtgattaattaaataaaaagtcttactactataacaactctaaacctggtttaaatgaaacatctaattttgctgtaaggcttaatgctcttcttttgtttagccaagaaaacattcttagttggaaacaggtggtaaagtagtttggcctgttcacaacttatcaggaccaatatctagtgtggactcagtgttctctaggtttgtgagcagttgtggtaagagaatggaaggcaacactgaataggagttaagggaatggcacgatcacagtgagagagctgcactcacctgcagacccagtcagatggcttgtcagtatctgctctgaggaaccaggtcccacctccccacaaggcaaatctagacccattaaattattacagtgggcttttttgttttaaaagtggttggggatccacaggaacgacattcatacagggacatttgtgaaagcaaagcaagaatgaatgctttcccgatctcagactggctggattcagatcagtgtgttggctggttctcattttaaggggtaagcagtttgctattctgtgactttagtagatctcttttgtgtgcacatatacaatgtgcattatacatatatattaaatatatccacaaagcagatgggcaaaaagattttcatgctaatcttcaaaggttcatgctcaatattgtgaaaagcttttaaaagttgttttgaaaagacaatcattttttgtttttgttttaactttcttgtggcaagctataccggaaaagcggcatgtcaaaaatactttaggttctacatagatctctttctctcttttgttttgtttgtttgtttgttaaagttcattatttattttaccttttactgacaatgtgaaactcgaagaaaatgttctctttttaaatatacagtcataaactgttcaaggtaaccataacaaactaggtgttatttattaacgtattataaaataatgtttgatccagtatgtgcttgtcttatttaaaattggaatgtgagacatgttgctgtgacctgtttttctttctcattcacatttgtagatattgtgtgaactacagtatataatgataacaattaaaaggatattctgtggatgtcacgtattttgaaatgatagaactacattagctttgtatcatgtttggataattcatcaatgttcacagtttaaaacatcattaaacattatgtaattacaatgagaaagaatcttacttaaatttggagattttcccccacatctcttttccggatacattataattctggacccctatttatctcaaaactcttaatatatgcagaccaacaggtctttgcattccttttaaataactggttgtgacaaagcttgttgttgatcagattcactgtttcatcatatttattgtaatatattttttgttttgtaaatatgttacaacaaaatgtgattggtctaaaatatttgtaatgtatattaaaaggttcaaaaatatttgtataaatctaagttatttgggtacttgtaggaatacaatgaggagcttgaatgccaccttctgacatgatttacttttaaggaaagttatgaggagagaatacaaaaagcatgcaccaaaatgtaatctgacaggatttctggatttatacgtaatcactcctgccccaacacacacacacacacacacacacacacacacacacatgcacgcacacatgattttgattatgctacatgatatatgtttcaaaaagaattagcatagaaatcctggtctcctagccaaaaaaatcaaaggattttcaaaaaaacgaatctgtatgttgaggcaaaaggattgaacctggaagtctgggactttatcatagaaacaaagtctcagatattttagttctttggaaacaaatgctgtaattcaaaagcatttgacctgtcactgtactatctacatgtggaagaatgttcaagttgaatcctaatgccgtgaatgaaacacagtctgtgtagggaatgagcaaaaaagttgaattccaattgctttttggccttttggctaaaataaatgtagcatctaattttatcagttt

SEQ ID NO: 336 - DNA, 2318 bp, Homo sapiens
ctcaacgtcgaaccgaaggcgacacccacccaactcctccctctccgccccatagtccacccaacacttgcagcccctccagagaaaaagcccagcggaagaggactccggaaaagtgactatctcggaagaccagggtagagctcccgggagaaaaaggcgaagatccccggccccggatcgccatccccttccctggcaccagcttctctaggctgcgcgaaggaagagggtacgacgccggggagggactgggtgcgcgggcatgaagttggaggtgttcgtccctcgcgcggcccacggggacaagcagggcagtgacctggagggcgcgggcggcagcgacgcgccgtccccgctgtcggcggcgggagacgactccctgggctcagatggggactgcgcggccaacagcccggccgcgggcggcggcgccagagatacgcagggcgacggcgaacagagtgcgggaggcgggccgggcgcggaggaggcgatcccggcagcagctgctgcagcggtggtggcggagggcgcggaggccggggcggcggggccaggcgcgggcggcgcggggagcggcgagggtgcacgcagcaagccatatacgcggcggcccaagcccccctactcgtacatcgcgctcatcgccatggccatccgcgactcggcgggcgggcgcttgacgctggcggagatcaacgagtacctcatgggcaagttcccctttttccgcggcagctacacgggctggcgcaactccgtgcgccacaacctttcgctcaacgactgcttcgtcaaggtgctgcgcgacccctcgcggccctggggcaaggacaactactggatgctcaaccccaacagcgagtacaccttcgccgacggggtcttccgccgccgccgcaagcgcctcagccaccgcgcgccggtccccgcgcccgggctgcggcccgaggaggccccgggcctccccgccgccccgccgcccgcgcccgccgccccggcctcgccccgcatgcgctcgcccgcccgccaggaggagcgcgccagccccgcgggcaagttctccagctccttcgccatcgacagcatcctgcgcaagcccttccgcagccgccgcctcagggacacggcccccgggacgacgcttcagtggggcgccgcgccctgcccgccgctgcccgcgttccccgcgctcctccccgcggcgccctgcagggccctgctgccgctctgcgcgtacggcgcgggcgagccggcgcggctgggcgcgcgcgaggccgaggtgccaccgaccgcgccgcccctcctgcttgcacctctcccggcggcggcccccgccaagccactccgaggcccggcggccggcggcgcgcacctgtactgccccctgcggctgcccgcagccctgcaggcggcctcagtccgccgccctggcccgcacctgccgtacccggtggagacgctcctagcctgagtagcgccgcggggcccgggaacgccgagtgcgcgccgtcggggaggcgggaacgcgggcccgcgcgcggactttgcactttgaatccagaggaagatgaatttttaaaatctccatcaaacgtgccttaaagctaaagcattttgacaggagtatttaaacttagtccaggatattttcctttgtgttttataactttacagaggaccaaagcaattcttgttttagtttctttgcgaagcctgctcctccttcccttcataaggactttttttgtctttctttaacgcccaggcttcgtcttatttctactgtttttgtcgcaacttccattgatttatgtcccttccctcccccctaagtacatcagggaacctttccacactataaatgatatgactactgtttggggtttctgggcccccatccgtgtacgtatgtggcatttccaggtatgactgagtgtgagagacatgtcagaggctcttcagtgatttcttgctattgaccgatgcttcactgtgccaaaagagaaaaaaaatgttgggttttgtaattaaattatttatatatttttgaaacccgaattgaaaatgttgcaggcaacgggctacagctttattagtggttctctaactgtggtctccttgggccaagcaatttctttaaaggaaaagttgattatgtatgtggggtgccaggaccactgccttgaaagcaagtgtgatttttatttttaatattattttatttgtgtctgtgtacatattcatgtataaattttatgaaacccaagcatagtgcttattttttaataaaacaactgacttaacacattgtg

SEQ ID NO: 337 - DNA, 2356 bp, Homo sapiens
ggaagcacactgcggcgattctggagaggttgtccttttctggcatcagcgttgcggctcgaggcaaagctggtcctgtgcctgctgtccattgccgctaaggcctgctgctgccattcaggcgtgtctctctctctctctctctttcatgccgctctctccaccccatcttgggacggccagctctaagaattcctgctacgacactgaattcaaccaggaggtgatgccacactcaatcagaaactatgctactgctgaagaggtatattgagccctgcctggttaacctccagtgaggttattagagaattgggagaggctcaaatcagcatcctgcacctagttatcaaaccattgtgaagtcttgattcctggatggccagaaaacttgtcattggtcaagagcaacattaagatctgcctgttactcatactgatgcttcctgcccagcaagttcatcagagggcgaggatgaattacggttgccatgaatgtccttgtgaggcagttgggaagccttggctggattgtgaaggatatttgaaaagtattttagagtccaccagatcatccatgtgagtgaccatgcagcaaaagaaggagggtcctctcagtgattaaggattatgaagtattaattcttccactgatatctcaaaaggtgatctggacaaaggaacaggtatctcaggattcctccttggtcacttttcagcagcagcctgctcttcttttgcaatctcttcaggatctctgtagaagtagagatcaggcatgaactcccacgggtgttcacgggaaatggtgccacgcatgcgcagaacttcccgagccagcatccaccacatcaaacccactgagtgagctcccttgttgttgcatgggatggcaatgtccacgtatcacagaggagaatctgtgttacacagagcaatgtagagacggggtttcaccgtgttagccaggatggtctcgatctcctgacctcatgatccacccgccttggcctcccaaagtgctgggattacaggcgtgaaccaccgcgcccggccaggagagtgtattttctacacataagttcaggtcatctccacacagacccagtttgcctccctcttttccgatctgaatgcctttaatttccttctcttgcctaactgtactggctagaacatcccgaactaggttgaatgaggtgctgagagtgggcataattggcttctttacctccgaagaaaatatttcatgttttcttcattgattatgatgttagttgtgggtatttcatttactgcctatatggtataaagatacattccttctatgcctaattggttgacagcttttattatatcaaattctataaaactgttttatttttaaatctattgagatgatcaaatggcggtgtccctcctcctttataagactatttaaaacatccttgcctcagagggacaaatcccatttgaacatggcaagtaatcctcttaatataaagtggaattaggtttgacagaaattaccagtgaagcactatgggcatatatttgataggagatttttattatggatacaatttacttgttattggtctcttcagatattctttctcatgactggatttgcgtacgttgtatgagtacaaattttttcatttattctacgctgctctttattatatgcttccttctgtaaaatttggactgtttgttcttcccattatattaatagttgcttcaggtgtaacataaggttattttttaagtacttttctggtatcacaaatattggtgttttgtgtttcatctttcatttgtcaaaatattttttaacttccatttggatttaatgattcacccattcattattcaaaagcatattgtttaatttctatgtgtttgtgaacattctaatgttcattctactaatagttcctaggttcatgcaatgtgcttaaaaatgtggtataatttctgtattattaaatgtaaaactagtcttgattcgtaacataaggcctacgcaaagatccatcttctgcagagaagaatgtagattgtgccgctgttagacgaagtattctgtatacgtcagtttgctttatttggcataaagtgtagtgtaagccagatgtagtgtaagtcagatccagatgatctgcccattgctgaaacttcagtacttaagtcccctattattattgtatggcaatctatctgtccactcagaagttattatatttgttttatatgattgagcacttctgttttgggtatatatgtatttacaattactataacctcttgctgaattaaccccttttaccattatgtaataaacttatttccc

SEQ ID NO: 338 - DNA, 14178 bp, Homo sapiens
cccgagccccgcccctccgggcccgggtcggcgcgcccagcctgccagccgcgctgctgctgctcctcctgctgtgggaccgctgaccgcgcggctgctccgctctccccgctccaagcgccgatctgggcacccgccaccagcatggacgctcgccgcgtgccggtgagggctgggcgggcgaacccgaggggcgggcgcggtgggtgctggacgcaggcgggcgcgggccgaccctctccaactccgcagcctagcgctgccttaactggtggcctgcctaggcgttgcccgcttgggcaagcccctgattttgtgcacctgggataactgagggccatggggacgttcctgcgtggcgtgcgcacccgaagtgcgggcggcgtggagacttgagtcgtttgcaggatggctagcagcgctggaaagccctaggcacgtgcgtccgccaaaggccggacagcggccgggagcgctggccggtcccgattttgcctgccaggcagagccagcctgcctgccccctgggaggttgtcccgcagcggcccagccctttcccgcacacaactcggagccagtgcgtggctcgccgcgtctatacccgcgctcagtgggtggcccttgggcgcgcaccccgcccggcaagagacgcgtccgcttctaaccgctgagggccagcgcgtctgaggtttaaggtcttgcgaaccggtctcctagaacttgggctgcgcacgcagtgtgaagcgaccgtagtcccgggcggtggttaagtgcatttaaagggcttggtgggtcaaagcgttcgccgaccatttgctcgtttcctacttcctccaccccaacccccaaccccccaccccccaccccccagccttactcttagctgcaggacgttgctctgagtggaacgttactttttgctctaacggaagccagaacgtagggtcgggctcctggagagggtagaagagtgggggttgggtgaaacggaagacaatgacatgtttaaaataaatatcaggggttagggaccctcgcgggggtgggtgcgatggggcgtggtttcagagctgagtcgccgccccggtggagctgggcattggctttccggatgaagaaaaccatgtgtagctggtcttggaacctgacatgcctgagttcaaatctgagccaccatgggacttgagtaatccatttcgctttcctgagcctcagtttcctcattggctaagtgagaataacgatagcacctttgttgcaaagaattaaacctgacgtgaaagtgtacttaacatagtgcctggcacgaaaaacgcctactataaatggtattagttattacttacctgccaaagaagttcatctccgtcttgactatttgccttgctgcttttttgtggcttttcctccaaagatacgtttgcctggtaaataactcttggcttgtgctgacttgttaaagctcagcctgtatttctcggacagcttccaatagaatgccgcctttgaggctgtctggggcctctgactgcttgcaggtagattgatgagtaaagggtggtaattcctgcagtaatgcgatgaacactgctgcttaagaagatggcagacttgagttctccttcctgcccctgtgatcttgcagtctattacaccttcctggggccttgaatatcctcatctggaaaatgggatctgagatccttttcagctcccaacattcattgtgtcccaggctggagtgcagtggcacagtcacggctcactgcagcctaccgggctcaagcagtcttcccacctcagcctcccaagtaactgggattacatgtacgcaccgccacatccggctgatttttgtgtttttagtagagacggggtttcaccatattccccacgctggtctcgaactcgtgggctcaagtgatcctcccaccttggcttcccaaagcgctgagattacaggtgtgagccacccccctacacatacacctaacctttatatttagtagctctaccttttacacgttgtcctgccttgttaagagggcaaaagacaaaaacttcctaagatgattgaacggagtttacttaggggtatagggatgttgggagtgccatcatcatgaaaataactttatctgcaagagactgaaatgcgtaatgttaggccaagaaggagggcaagaatgttctggtcacctgacatcttacatcttagcatattttgtagaatctataccagagcttgccctttcaaagttttcagtgtaaggaatcacttctgctattccatggccccatttaaggaataaaaacacaggacctaatgcaacacttaggaaatctcgttaaatattaagaaatgacaaaccactatcctttttttatacaagatagatgccaattacattttctgagagcagtgccaggctgttcagtatttatgaatgaatgaagcatttctatgtaagtaatttgcactttataaaaggacttttaaaaacttaagtcttgtatagcaaagggacagcaacaagaactgaatgacagcctcaagtaatagagtgctaaaatggaatccggtatcccacctgcatttggagtgctatttgatctttaacttggctccttgtaccatttgttgaagcgtttgatgtatttgctttgtaaggacttctgtggaaatcacgatagccctcttgattggaaaggggcctgcttggaagcctgccatcttgaagtagaggtcctgcccagtttttgtagtttgtgaaattagcatcacagtacatagcccaaagcttacataaaaatacctcattagcttgattttggctgagggagaaaaatctttctccccttttgtacttttgaaatttccttttagaagtacagtttaatttttttaaaaaaacaggttggattttaggagtttagcattaaaatctcctgtggggctcagtataatgctaagagctaaagattaggggctcataaaggtgggttgagaggtagctctacagatgtttgaataaattgataaatgtctttacaattttcctgcaaagggatcccttcttagaatttgacctggttttggccgggcgcggtggctcacgcctgtaatcccagcactttgggaggccgaggcaggcagatcacgaggtcaggagattgagaccattctggctaacacggtgaaaccccgtctctactaaaaatacaaaaaattaaccgggcgtggtggcgggcgcctgtaatcccagctactctggaggctgaggcaggagaatggcgtgaatccatgaggcggagcttgcagtgagccgagatcgcgccactgcactccagcctgggcgacacagcgagactccgtctcaaaaaaaaaaaaaaaaagaatttgacctggttttaaagatttttgggtccagatacagtagctaatgcctgtaatccaagccctttgggaggctccggtgggaggatcacttgagcccaggagtttgagaccaacctgggcaacatagcaagaccccatctctaaaaagaaataaaataagttagctgggcatggtggcacatgcatgtagtcctgtctactcaggaggctgaggcaggaggcttgcttgagctcaggagttccaggttgtagtaagctatgatctcagcactgcactttagcctggaagacagagcgagatcctgcttcttacaaaaaaaagaaagaaaaaattttttgtagcagttaacaaacttccttttctatgtagggtatgataaatggacatatctactctgtgctgtttgaacctactaaactaaaaaaaaatgatgtctttagttaaataaagtaagcatcacgcttaataggattgctatttccatttgcagcagaaagatctcagagtaaagaagaacttaaagaaattcagatatgtgaagttgatttccatggaaacctcgtcatcctctgatgacagttgtgacagctttgcttctgataattttgcaaacacggtaagtgctgcctgagaataaacagaattgagtctgcagtgctcaaaatgccccagatgctttgtgcgtgattaaaactgcttgctttttgcctacatttctatacagccgttatgaaaatacagtatgcactataatttcatttcactttttgctgtggttctaggtagtaattgttggaggtagattagctacttattctatccttttgaaatgtcgcctaacctaacatgcatgatgatttgccataacaactcagaaatcatttgtaaacctctgaaccatttttctttgtaacaaaagctgttctcttgtagtgcacttgtaaatgtgatttgctctctgcacggtttatggaaaattggttcttgaaaaagaaaaaaaatgcacaaccgcatttatttatttattttacagaaacctaaattcaggtcagatatcagtgaagaactggcaaatgttttttatgaggactctgataatgaatctttctgcggcttttcagaaagtgaggtgcaagatgtattagaccattgtggatttttacagaaaccaaggccagatgtcactaacgaactggccggtatttttcatgccgactctgacgatgaatcattttgcggtttctcagagagtgagatacaagatggaatggtgagttcgagaatttcaccagtttcaagaagtaagatacatttagaggcatgacatatttttagaaatttttttcttgtgattttgattttagtcatgccagcagactttgttgaccttttaaaaatttttagtgttttcttcatgtcttaaagcagtgtttactaatgtagtcggacttacaaatcatgaacattttgtaggctctgaaaatttggaaactggtaagataaaattggccaatctccagattttcgtttccacaaaaatccagcctaatcaggaagcacactagttctaaatattatctacatttgcatttaagttcaagtgcccagcctagtgcctgtcatagagcagacctttgataaatgttggtctcatagtagatctgtggctgcatcttgaaaacctgtgataacttacgtgcaggagctccattgcagataatgacattgagggcccttcctgctgctacttttgctccttggttggcttttcctatgcacgctaccttcctttaactgccgctgccactgttgtgctgtgcctcggtcccactcttctgagcatactgcttaattctgcacacattttcctgttccaaagactttcttgacaaaggaagcagtgcattcactgataatcaagtgcatgctcttcaactcactggtctgacatggatccactgcctgaggttcatggtttgagtaacattgatagaagtggcagtgcctggccaaggagtgttttggtccaaatcagtgcatactggagtttgttgcagggggtccagtctgcagatctggatgcgacacaaacattgtcaatagcctgaataatttctgggcagtgtttcagttctttgaagatactgtcatgattaataaaatgccaattcattataattgttaggaactcatgaaaggtttttgttgttttgtactctctcaatccatggacactaaaagtacaaaaagctgtttgtgggcatgtaagacttttgagacagggtcttgcactgtcaaccaggctggagtgcactggtgtgatcatggctcactgcagcctccacctcctgggcttaagcgattctccctcagcctacccagtagctgagactacaggcgtgtaccaccatgcctgggaacttttaaaaattttttatagagatgtgggctcactttgttgctcaggctggtctcgaactcctaggcccaagcaatcctcccgtctcggcctccaaaagtgctgggattacagccaagagccaccttgctggccttgataaatattttaatgttaaaactgagtctttatgggtgaaattctgggatttatgggtgatttttttcttctctctctctttttttttaacctgcaaccattaccatagtcaattttggaataactttatgaccccaaaaaatgactctgtacccattaacagtcactccctattctttcccaacacccccagctcctggcaaccatcagtctgctttctgtcgtcatagattagcccgttgtggatatttcataaaaattgaatcatgatatgtggtcttttgtgactggcttctttcacttaggataatgatgtcaaggtttatttatgttgtggcatgtgttagttcttcattttattgcagaatattctgttgtgtgaatcagccacatttgatttacccattcatcagttgatggataagtgggttgtttgcacttttttggctattatgaataatgctactgtgaacattcatgtacaagtttttgtgtagtttttgtgtatactcttaggtatatacataggaatagaattgtgggtcatgtagtaactgtttaaccttttgagaaatagacaaagtggctacaccagtttacattcctaccagcagtgtgtgagggttacagtttctccaaatttttgctaatacttttttttattttccttttgctttttttttttttttttgagacagagtctcactctgtcacccaggctggcgtacagtggcataattttggctcaccacaacctccgcctcctgggttcaagcgattcttgtgtctcagcatctgagtagctgggactacaggcatgtgccaccacacctggctaattttttatatttttagtagagacggggttttgccatcttggccagactggtctcgaactcctgacctcaggtgatctgcccatctcagcctcccaaagagctgggattacagatgtgagccaccatacccagccttcttttgctttttagctctactatgaagtggtgtctcactatgttttgtgtttttttttatttttatttttcggagacggagtcttgctctgtagcccaggctggagtgcagtggtgtggtctcagtgatctctgctcactgcaacctccgcttcctgggttcaagcgattctcttgcctcagcctcccaagtagctgggattacaggcgtgtgccactgtgcctggctaatttttgtatttttagtagaaacgggatttcaccatgttggccagactggtgtcaaactcctgacgtcaggtgatccgcctgccccggccttccaaagtgctgggattataggcatgagctaccgcacccagccttgcattgtgattttgatttacattaccctatggctaatttggataaatttttaatgatgaaaacctatattacttttggaatctggaaatattttcattttgaacttctaaaagtagattagagaagtacctagagaagtcaaatgtatagacagaaaataggatgatggttgccaggggcggagggaaagagggaatgaggaattactgtttaatgggtatggatggagttttagttggagaagatgaaaacattctggagatggatggtggtgatggctgcacaacaatgtgcatgtatttaatgccattgacttgtatacttagaaatggttaaaatgataaatcttatgtatattatattatatattttttaaagtagagaattgagatctgttaatataatttaatattgccataaacattgaagccatatttataggggaacacatttttttccctttttttttttttcaagacagggtctggctctgtaacccagccctggcatacagtggcacgaacacggctcactgagcctctgccccctgggctcaagccatccacccacctcagccttccaagtagctgggaccacaggcatgcgccaccatgcccagctaatttttgtatttttttttgcagagacggggtttcaccatgttgcccaggctggtctcgaactcctaggctcaagtgattcacccgcctcagcctcccaaagtgctgggattacagatgtgagccactgcacccagccaggagaacacatttgttcttgtcagaattcttttaaaatacataaagatctgtttctaaagaaatgaaaagcaggtggtaggaattttaacattttaaaaaaaggctcagaaccacaggcctagggactatgaaaatagcttataacagtgtggtccagatgggctacatggaattaaactgcactctgttgatgtactctttgtggttcctgattttgttacccagaggtatcaatgttcagttaaaattcatttcatacaagtgtctcattgaaaagggactttgtagttatactgatgcagcttgtctgctgatcaagtcctaatgactcaattgttgtgattagaggctgcagtcagttcgggaaggctgtaggacccgcagccagtgcaggcactctggacctctcagggtggcgatgaagtttccagcgcggagtaccaggggagcaaccaacaaaaaagcagagtcccgccagccctcagagaattctgtgactgattccaactccgattcagaagatgaaagtggaatgaattttttggagaaaagggctttaaatataaagcaaaacaaagcaatggtaggtatctgactttgtgttagaattaatttttcctctctaagcgactcattacttaaatctgttccatcacgcaaaagttatttttttctgttacatgaataaaaagttatttttgtttacctgtgaagtcttcaatgtgtgcctcaaaatgtgtttctttccctgaactactttttttaaatctgttaaaggcctggttaagtgtataggggaaatcagaaactctgaatgtgtcagcttactatcaaatataaaaccatgagatgtacttgagtattttccagaagttagttgctcattttcgacagttattctaagccaatgatatcagtttaatttcctccctttttagcttgcaaaactcatgtctgaattagaaagcttccctggctcgttccgtggaagacatcccctcccaggctccgactcagtaagtaccagttcttgtttatatacagtagtgttttgggcacacctaaggtcgatctgtgttgtatttaaaaatctaatttctttatttgtgtggccttctagacaaacgaaggggacctagaggaaaccccctgacagatctctggatgatcctccttgaatcctgggcagtttggtctctccttgctgtgctcctgtggcactaaactccttttgattggttctttctttccttcccagctagactaagcccctcatgggcaggtaatgaagattgaaaacttttttctgttctccagtgtgagcacattcctcctacatggtagatgtgcaatagatgtttttaaaattggagaatgaaaataaaagaagaaaatcacaatttcttatcaagttgtagcttggtatcatacacaattgcattctgaggaattaaggtggtacaacttagggagatttggtgtgtctgctgtgatagaaaagatttctttttcctggctttccctgaggaaaggaaagatggaaagagggaagccatacagatatccctctattttgcagtgtagaaactgaatgtgtttctacagggtcaagagacatcagagaaaatttttttttttagaacagaagatcatttcttacatcttcattaagtaaaagaataaatagctcatctctcaagttgaaagaaactgggcttggtattacaaaagcaaaattaagatggccatataggttttaggctcattttgccatgcattatgcaaaggacaaagaaaaagaaaaaatagagctctctttacttaaaacatccttaaggagaagctatgaattccccaaagtactacttctctttattatggaataaatggattcccttatacgtgctttgtttagcaatcaaggagaccgcgaaggcgtacattcccgggtgttgcttccaggagaaaccctgaacggagagctcgtcctcttaccaggtcaaggtcccggatcctcgggtcccttgacgctctacccatggaggaggaggaggaagaggataagtacatgttggtgagaaagaggaagaccgtggatggctacatgaatgtgagttctccgcattggtacttgctcttctgattctcatcttcggtaggcctggcatcatacacagcacaggtacacgcacatccttaacaccaggcgatccatagtaaatgttttcctctaaccattcagaactgtaaacgtcacataagcttacttggtaattttattagcaggcgagaattgggttttcttcatctcttcttaattgtaggcatcgtttccaaaatgtccagttaggctacagtaagcgtatggcctgttcccctaccataagctctaggagagatttccaggttgaagtttgtgtgaagaaattacaagtcaagtatctgagattcaaagctggggagagccagttttgaatctctgtgtttcatatttgaatctgttttttcagttttgaatctctttcagtttttcagttttgaagttctgtgttttgtattccttgtaatgcaggaagatgacctgcccagaagccgtcgctccagatcatccgtgacccttccgcatataattcgcccagtggaagaaattacagaggaggagttggagaacgtctgcagcaattctcgagagaagatatataaccgttcactggtgagagcctctaaattacacctgagaatgtaaacatctgtgagaggaagagagcttctgtccctaagcgttgcccaggttctaaagggcctagcatgtgaaatctgtacctatatgtttttttcacacaaggaaggaaaagttttacagtatccctgggatttagccctctttcacagtggaattatctgcttagtaagtctgtagtcatggtaaatcttttctcctaatttagaaatcaattcattcaacatatatttactgcatatctattatgtgtgtatacatagctaggtgctggagtgtggtggtacaccaaagataaaagtggatttgggtaggttattttttaataagaccttttcttaaagggaaagcggttttaccacaccaggctaatttttatatttttagtggagatggggttttgccatattgcccaggctggtcttgaactccttggctcaagcgatccactctcctcagtctcccggaatgctggggttacaggtgtgagccactgcacctggttgagttatttttcataccctggcatatacatgtgtatgtagagattcatagacaaaatgtaagcctatactacgaagagggacattctgtaaatatgccatttcctctgttgaaaaacagtggttttttttgttttttttcttaatggcttatttgtagggctctacttgtcatcaatgccgtcagaagactattgataccaaaacaaactgcagaaacccagactgctggggcgttcgaggccagttctgtggcccctgccttcgaaaccgttatggtgaagaggtcagggatgctctgctggatccggtaggtgcctgccaggggttggtcctgtgggcttgaaggtcagccacaaactgtgatgaggccagaaaaaggcattggtgaaggggtggagccctttctgttatggggtgctcttctttttttttaagatggagtctcattctgtcgccaggctgcagtgcagtggcgcgatctcagctcactgcaacctcctcctcctgggttcaagcgattctcctgcctcagcctcccaagtagctgggactacaggcacgcgccaccacacctagctaatttttgtatttttagtagagacggggtttcaccacattggccaggatggtgtggtggtacaagatctcttgacctcgtgatccacccgcctcggcctcctgaagtgctgggattacaggtgtgagccaccacgcccggcccagggtgctcttaattcagaacacaaatgaattcagagggatggtgctgcataggcatgagccgcttctacgatactcgggtctgaactgtccctgggaagttgctgctccatttatccctggtagctgcttgtaacttccactcctggaaggaagcattaggcattaggaaacattaggcatgactaatgcctattaatcatataaatttttaaccataaagaaggggttaaatgtaatgtagataagttggtgggggaggtaaggtttaacttaattgtgccgtttgacaatcctccttcagaactggcattgcccgccttgtcgaggaatctgcaactgcagtttctgccggcagcgagatggacggtgtgcgactggggtccttgtgtatttagccaaatatcatggctttgggaatgtgcatgcctacttgaaaaggtagtgggtgtttttttttcccttccacatctgaattttatattcatttatgtcttaatgagaagatgatagatgtcagaagagtggttatctctggcggggtggagactgactggaacggggcacactggaagggatgggaacattttctgtcttcacttaggtggtggtaacccgggtgggtgggtgtgtatgaaaaagtcaggtaatatacttgaagatgcgcacacttgaccatagtgatgttataactcaataaaaatggttttaaaaatgaattaggctttcaaaagagaattctttggttgaaaactatgtcctgacacatttccttttgtttttcacagcctgaaacaggaatttgaaatgcaagcataatatctggaaaatttgctgcctgccttctacttctcaaatctttcttgtaaaagtttccaattttttcactgaaacctgagttaaaaatcttgatgatcagcctgtttcataagaaactccaatcaagttaatcttagcagacatgtgtttctggagcatcacagaaggtatattgctagttacactttgccctcctgcagtttcttctctgctcccaacccccatctcacagcatccccctctatttccaatgctcctctccaaccgcttagtttctgaatttcttttaaattacagttttatgaaagcatattttatttacttggtgttgaaatagccctcataaaacctaagcacttggaaacacaataatagtattaactaactagatctattgaatttcagagaagagccttctaacttgtttacacaaaaacgagtatgatttagcattcatactagttgaaatttttaatagaatcaaggcacaaaagtcttaaaaccatgtggaaaaattaggtaattattgcagattgatgtctctcaatcccatgtattgcgcttatgttacaagttgttgtcacagttgagacttaatttctcctaatttcttctgcccgaagggtaagtggtgcgtccagcttacacaatcataattcaaaggttggtgggcaatgtaatacttaattaaaataatgatggaagagctatctggagattatgagtaagctgatttgaattttcagtataaaactttagtataattgtagtttgcaaagtttatttcagttcacatgtaaggtattgcaaataaattcttggacaattttgtatggaaacttgatattaaaaactagtctgtggttctttgcagtttcttgtaaatttataaaccaggcacaaggttcaagtttagattttaagcacttttataacaatgataagtgcctttttggagatgtaacttttagcagtttgttaacctgacatctctgccagtctagtttctgggcaggtttcctgtgtcagtattccccctcctctttgcattaatcaaggtatttggtagaggtggaatctaagtgtttgtatgtccaatttacttgcatatgtaaaccattgctgtgccattcaatgtttgatgcataattggaccttgaatcgataagtgtaaatacagcttttgatctgtaatgcttttatacaaaagtttattttaataataaaatgtttgttctaacttgtctgcttttttaaaaataatcttactgtacttaattctaattttttcctcatatttaaataaaaggccatttccaccttttctaaaaaa

SEQ ID NO: 339 - DNA, 81008 bp, Homo sapiens
atacggagcaaggcatgtttgaagagtacccgggtttggtagagtgacttctattcactaaaaccatgtgtctgaactgaagaagcttgggctcacttccacaaatgtaagtgctgattttttaaaaataatattcctttcactattgatatgtgctacacactaggaagttgtataatttccagaaaaatgtaacaaaccagctgcttaacaaatcaagccctgcttaaataaagggaaggtaactggtattctgtgggcttatgggacatgtgttagaataaacctcatgacatagaatagaataataccttgagacatggtttagaataaagtagtttattttaaaaaaaaggaggaacccaggtcacattaaccatcaaaggcaaaaacaaaacactctatgagttgcttaaaatatgtagatggctgaaatcccctaaaaactttaaatatctcaaaaagcatacaggtatgttaaaaagactgtgctttgaagatagataaagttgcaatcagcagccccactgcttattagatttatgaccattgacaagatgtttcacctcgcaaagtctcagtttcctcatctgtaaagtgtgtgtgcataacctacctcattaggttaatagcattaaattatgaataaaagataatcatgtaattaagttaagggggtcattaaattagcacagtgcattgtactgaatagacagatgatacatgatggagggtaacttggcttcatcctaattaagtttcaattaagcttggaaaacacaccaaagaaacaaaaagacaaatactggatgattcaacttacctgaggtatctggagtagtcaaactcacataaatgatacttagaatggtagttgccaggggcttgggggaaggagaaatgagagttgtttaatggatatagagtttcagtttacaagatgaaaacacttggagactgtacaataatgtaaatatatttaatactattgaacttaaaatttgtaagtgtaaacacttacaaatggttaggatggtaaattgtatgttaagttttttaccacaattaataaagatagattttaaaaaatttatttttaagatcaaaaagcatgtagtgaaaattccaatgccttccatttattaaaggtcttcctaatttcctaaaaatgtcttaagtctatattcagtgggtctaatttaggattgatattgacttatctatgttaatgtctggtttttacatagcaattactgggtgataatgatgaatttcaggtatattcttaaagttgtcttaacctcagtggtgattcttttatgcccccctgaacttaattacatgattatcttttattcataatagcgatttttaatatgatttcatgggtagtgtacagaatctagaaattatgaagtcataattattagttacaatttgcttaaaagctttagttatgactcatttttaaaacttaaagcaaaaatattatttattccagttttctcaacttccttgtagctaatttacaaatagaatatttttatctgtttgtgttttagagataataaaaactattaaggcaaagtttgttaaacaccatcttatcttaaaatgtattggctgatttggaggacaaaagacattttggaattatactaattttgaacttgaagacatgtctgttgaatttttagagaattctttcttgaaagaccacacatatgcctaggtgtctattaagactaaacatcccttatggcatttggtgataagtgaaggtgataacaaccagcatttcagatgactgtgcagagttttacatgtgatatgccatatattaataaatgtaaaccctatgtcagcaagtccaggatagaattagaatgaaacttgtaattctccaaaggtggaggaaagctgcagaggcactgaacactgtatacttctaaaagggtggctttttttgttgttgtcaagtgccgtctatggtgtagtgtctctaggaagtgtcattcattcaattgacaaagatttctagcaatcctgcaatatactccccctgggctgggtttagaggctagaagaaactcatgcacagcccttgaggggatccttatctactagcagagatatgacctcataaatagttaaagagagtaagtgctaattcattagtcattcatgctgttcatagagtcactccacagaaagtgtgatgctcagtatcaggggattaaaaagacaccttcaaaaacctttctttcaactataattactggagaccaaataaataaataaataaataaataaataaataaataaacttgagatgtatatgagtcattcagaagcagagtggagtgacttcctaaaacacagaagagacgcgtacccaggctgccagaggaaggggcagtcacagtgccctgaatttcaagaggacattgtgggaggtggtggaactttaagcaggcctggaaaaatgtgcagagttgagatgggcaggaaaaggtcatgaaagtatctcacgtacagcagtgttttccaaactttcgcacattaaatgattttcggaaacatatggactgatcaatcaataacaataacattaagattacagattgagaaagttatattttttgacttagtttcaattcttcagaaataagttttgttgtttttgatatgacttaaacttctccaaacacttgtttaagcttcctttataacactcacagaataagcaataaatgttagtaggcaaaaagtacttagtttaatttaattactgctttaaaataacatttatatatagttattgcctatttattacaatagatatcagcttttttcatttatggtactaatagacattaacctttcaaatatttgtcttacttaaaataagagtgaatttacaggaaatattaagtaaaaagtagttcaggtggcaattggtagtggaaaaatcatgatgaggtaccagaatgagtgaagtttgggaaacactgaagtagggggaatatcaagcacaagaattaggaagtgaaattgaatgggctgtttttatgtgtagctggaaagaaaggagggatactgggtattccatggagggtattctaggggattttggatgataatgctggaataaggttggttgtggaagctttaaagggatttattcttcagcggctggataacagggggctcaaaatggttctgaccaggagccaactgtggaaatccatactttagcgggttcctcctgggcatagtgtgcaggaggattggagcatagggaatatgacaccaggagagctctttggaaataggtttcaataagctgaacatgaataaatgaagagtggtaggaattaaaatggaaaagaagcagaggatgaaggagtaattcaataaaaaagaaaactgaataataataattatagtgacagccaagctgctcttgagtttttatttattttatttttaacttttattttatgtacaggggtacatatgtaggtttgttacataggtaaacttatgtcatggggcttcgttgtacagattatttcatcacccaggtattaagcctagtacccaagttatttatcttgaccctctgcctcctcccaccctccacccttcaattggcctcggtgtgtgttgttcccctttatgtgtccatgtgttctcatcatttaactctcactcataaataagaacatgcagtatttggttttctgtttatgatagcctccagccccatccatgtccctgcaaaatacatgatcttgttcttttttatggctatgtagtattccatggtgtatatgtaccacattttctttatccagtccatcattatgggcatttagatagattccatgtctttgccattgtgaatagtgctgcaatgatcatatgtgtgcatatgtcttcataataggatgattcatattcctttggttatatacccagtaatgggattgctggataaaatggtatttgtgtctttaggtctttgaggaattgccagactgtcttccacaatggctgaactaatttacactctcaccaatggcatataagcgttcctttttctctacgacctcaccagcatctgttattttttgactttttagtaacagccattcggactggtgttagatgatatctcattgtggttttgatttgtatttctttaatgatcagtgatgttgagctttttttcatatgattggtagccacatgtatgtcttcttttgaaaagagagcttccaaagggaagggtgggccaccatctttgcattttccacatcttaattattccagcctgtgggctttggaaatgtcaagtcgaccaaggtggaagtggtatcccagcacagaacagctgctctacgaaaacatgaccatacagcttctttaagccagtccctgatctcatttctttttactaggtggaacctaccaaatggggtctccagccactcccgctagtattcttccgcctacagaaatttgaaaactccctgggccagaactcccagagggaggagcgggctgccatctttgctgtttgagcctctggagtttttaagcttggtggtctgagagaaggacagtagcactgaaggaaaggagagggaactggttcttgtggggaaatgcagctttgtatctcaggtgatttgaaattgagaggagaatggaccttcaagcagaaaagggaaactatgttgttaatcatgtgggattggaattctggagtgccatcagggagggccagataaatggaggagacaagtatgttcctcattaaaatgacacctagctccgcttttcctcctgccccactcaagtttccaggagaagagagctgaagagagattcttcaggtactcagggatgggaaggcagaggaagggcatgctgactctttcctcccaggttttgttttctcttggttactgtggccaccaccttgcccagagataagaggcttctttataggggccttccttggaataaacagaaacatcttcatctccagccagaacagacatcaggtttaatttccaggaatggtagaagagttttgtatgttttctatttccactgggaagacacctaatttagatatttccccaatacatgtaatatgtagtagacatttaaagatagatattgcaaagacttatgtactcacctcccagtttaagaaataaaatattaaagataaaaaagtaccctgcttaatcctattctcttttcaccctcaaaggttaccactatcctatctttgtcgatatcactgcagtgtatgtttttattcttttcttttttaaatgcttttattctttccactgctgtgtatgtgaagatatccataaacaacagtctataagattgttttgaatgtttgaaaattttgtggaaacaataaagtatacattattcatctgcaacttgctcttttctctctacattatacttttaagattaatccatgtctattcttacagcacaacttattttcatggctgtatggcattttgctatcataagtagtactataaaatattatagtacattcctatttgtgtccaaatgaaagaattactctagtgaatatttgcagaaactgatttgctgaaccgtgggcatgtgtaccttcaactttatgagatattgagaaattgctttccaaaacatttataacacattatattcccagccaaaataggagttcctgtttctattctaaacatacttgtttatctcaaatgttctaatcaaataacctttccagatgtcactgaaagccagaagcttgtggcatctgggagactcagatatgtttggaacactcccatttctaaaatatggtgcaaaatttgatctgaaatcaacctctccgtttctcaacctatggcgttagagattgactgacttttccacaggtattaactttagtattattcatatgacttttccatttaacaggcacttactttagtattaatcatattaatcacaataatgataatgataatattgatagtaactattagtaccaactgagtacttactatatgccaaacacattaattatattatattatttaattaattttgaggaggagcagataatgctattatacctcttttagagatgaagaaactgattcccaggaatccttatgttaatagttagtaaatagagattgttagtctattccatctaggacagctgagaaatgatagatgggagcaaactgagaagagagacatcaaattattacagtccttaacttttaaaagtttagactctagacactatataaataatatcaaaagagcatacatacacacataataggaggcagatctcaaataagtgctatatttgtactgagaagaatttagttttgcataggaagattgggaaatgattcttacaggtgactaaactttactaagccctggagtcttgacagaggaaattaatgaggcaaaaattggaggcagtagctctttagaaaatatgggaaagtggcaactacagaatatttttgagaaagttaattaatgtatttaatcattaattaaacaaataattcctgaccatccattaagaggttctggggctacattgtgggatatagcagtgaacaagaaagatgccatccctcctcattgatggcagtgctaagagatgtacttggggaaatgggggcaaaatatgaaaagaaaaagattgaaaggataggtaacatctaattttgaaggattttcaaataccagcctaagaagcatgcacattatttcctgaaggcagtggggaatcaatataggtcactgtgacgtaggtagcgtcattcattcatttattcagttagcatgtattttacctgtattttgcttagcactgggtacatagggatgaaagaggtcatagtgcgatgaaagtgacaaatacatacataaaacgtataatacaatgtgagaactatgccagaggtttgtataggacagtgatgcctaacctaggctgtggatgtgcagtgaggagagagagggagagggagacagtggaagatattctaagatgcttttttgggtaaagaaatttgcttgaaaaaatctgccaacttgatttagacttttataaaataatgtgttttttgctgatttcaaaagtgttgcatgttcactatagaaaatctacaaatcacaattatgcttaccaaggatgcatacctttaaggtttgtgtgtgcattagttctcatgttgctatgaagaaatacccaagactgggtaatttataaagaaaagaggcttaattgtctcactgttccactgttccacattgctggggaggcctgaggaaacttacaattatggcagaaggcacctcttcacagggcagcaggagagagaatgagtgccagcagggaaaatgccggacaattataaaagcatcagatctcatgagaagtcactcactgttacaagagtagcatgggggaactgcccccatgattcaattacctctcatcaggttcctcccacagcacatggggattaggaagatcacaattcaagatgagatttgggtggggacacagccacaaccgtatcatttcacccctgccccaaatctcatgttctcacatttcaaaacacaatcatgcctttccaatagtcccccccaaagccttaactcattccagcattaacccaaaagtccaagttcagagtctcatctaagacaaggcaagtgccttctccctatgagtctgtaaaaccaaaaacaagttagttactccctagatacaatggaagtacaggcactggttaaatacacccattccaaatgggagaaattggccaaaacaaaggggctctaggccccatgcaagtctgaaatccagtagggcagtcattaacccataaagttccagaatgatctcatttgactctatgtctcacatccacatcacgctgatgcaagaggtgggctcctatggccttgggcagctctagccctgtggttttgcagggtacagcccacttctaagctgctttcacaggctggcattgtctgtggcttttccaggcatatggtacaaaatgtcagtagatttaccattcttggtcctggaggacagtagccctcttctcacagctccactgggcagtgccccagagcggactatgtgtgggggctccaatcccacatttcccttcttccctgccctagtagaggttctctatgagggccccatccctgtagcaaacttctgcctagatatccaggcatttccatacatcctttaaaatctaggcagaggtaccccaacctcaattcttgacctctgcccacctgcaggctcaacaccatgtgtaagccaccaaggcttggggcttgcagtctctggagcaatgacctgagctgtaccttgatcccttttagccatgactggaggtgaagcagctgggacacagggaaccatgtcccaaagttgcatagagcagtggggcccttggccctgcccacgaaaccgtttttccctcctaggcctctgggcctgtgattcgaggggctgccttgaagtctctgacatgccccggagacattttccccattgtcttggtgattaacatttggctcctcgttacttatgcaaatttctgcagcaggcttgaatttctccccagaaaatgagtttttcttttttatcacatcatcagactgcacattttccaaacttttatgcgttgctttctcttgaatgctttgccacttagaaattttttctgctagataccctaaattatctctctcaagttcaaagttccacagatctctaggtcagtggcaaaatgctgccagtctctttgctaaaacataccaggagtgacctttactctagttccctatgagttcctcatttccatctgagaccacctcagcttcaacttcattgtccatattactatcagcatttttgtcaaagccattcagcaagtctctaagacgttccaaactttcccacattttcctgtcttcctctgagccctcaaaactgttccaacctctgcctgttacccagtttcaaagtcactttcacatttcaggtatccatatagcagcacctcacttcttgtaccaatttactgcattagtccatgtttacgcttctatgaagaaatacctgagactggataatttataaaagaaagaggtttaattgactcacagttctgcatgctggggaggcctcaggaagcttacaatcatggtggaagacacttctttacagggcggcaggagaaaggatgagtcccagcaggggaaatgccagacacttataaaagcatcaggtctcatgagaagtcactcactgtcattagaacagcatgggggaaacttcccccatgattcaattacctcccacagggtccctcccatgacacatggggattatggggattacaattcaagatgagatttgggtgaggacacagccaaaccatatcagtgtgtatatcctgttaaccttttaatgccaatgatagatattatgaatggataatttataaaagttatgtaatatttttagttcacttacctatgtgtttcataattttgatatctttgtgtattcttctataatacaagtttaaattttgctcattttatgtcataatttaaacattcgtttattgatgaaaatacctattttttcccctaatatttgttattagaaattcaacatggtgaatagcgctatgttgcacatcgttcaaaaatcctaggacatatctgatttattttaaagataaatttctagaatttgaattataggtcctaacatataaaagcgtttcaccatattatagaggagaaggaaagtccttttaaaatatttaaaaataggctgagcccagtggctcatgcctgtaatcccagcactttgggagacagaagtgggaggatcacctgaggtcaggagtttgagaccaggctggccaacatggtgaaaccccgtctctactaaaaaaaaaaaaaatacaaaaattaaccagacatggggtggcacatgcctgtaatcccagctacttgggaggctgagataggagaatcgcttgaacctaggaggcggaggttgcagtgagccgagactgcgccactgcactccaacctgggtgacacagcaagactctgtctaaaaaaaaaaagaaaagaaaaagttaacaatggattgaatttgatgaaacttgcattttagaaagattatcctaaaaataatttaaagggcaaatagaaaagattggaggcagtttaccaggtcagatttatcacaaaaatctaggtgagaaaataataaagcctgcacaaaagaagtcaaattactaatggaacgtggcagaagattttagagatactaattttgtagaagttcatggattggcaacagtgactggggggccggaggaggtaaaactgattgtggattacctctcagtttctgacacaggtatctaactgggtggatggggatgtcctcattcctttcaacatgaaagacaagagaaacaggtttggaaggaagaacagataagttgacgttggccaactttgacatacctgtggccatccatgtggagaaattccttaagcaatggaacaggtcttggagtcaggaggccaaatggtttagagattaatagatgtgcaagtcagcaatccttcagtgtagctataatcttggctgtggatggctctcccaggggtgttaagaactgcagcataagattagggtgctcagggtgctgctctctgatgtaataacattaatgtttaatcagagaaagaaacagccatagaggagactaaaaaggagagatcagagaaacaggagaaaatcccaatggaaggtagagtgaataaggacaaagaaggagaacttctcaagaagggaagagctaacagtgtcacatgtcacagcaatgccaaataaaatagaaaggtgtcctttgaacgtcactggaagtcttgcctagagcagtttcagtagagtggcagggataggcactagaatgtcatgattgtacctgtgattcaggaagatgactgtcctcactatgggcagaatgacttagggaaggaagagacaataatgtgggagacaagtgtggtgaagatgggatcaggaccccagaaaggagataataaaggctaacccaaggcaggcaccatggtatcagaaagaaggggcctgggtagtggatttaccaagcagatgacgataatgtgtgagaaagacgatggagttcaagagggctctaatattttcatctgaaacaacagagaagattgtgaaactatcccaaaaggcagaactaaggaaaagaaatagacatttttgttgatagagataaggaagaagagatatattgatgtgaggtatatatggaggtgcctgagggtagggtcagtgttcacatggaaacagtgttcacatggagacgtcagaaaagtgaatgctacagttctgcagctctggggaggggtcttggttggggacaaacatcattgagctttcccataaaaatagggatttcaaatcatggaaaaggatggaacgactcaaggagattactgaaagtgagaagaaacaaacaaacaaacaaaaaacccttgagaaatgtttaaataaacagatatcacaggaggagccaccacagaaaacagggaagaatggtcaaagcaatagcaggaaaataaggagaatattatttcaaatgagtttatattttttggtaactaggtgagctgtaagaaacaaactttcttttcacaggcgactacaaaaaaaaaatagattgaattacaggtgaggtgatgaagtggttttaggaaattgagatcatgaccaaatcagaccacaccacagatcaagcaggatcaaggaagccccttagcatctgggcttttcctaactcctgctttgtcctggaaaatatattttaagaatatctgctgtaatactgtgatttattaatatgttatctttgagttattttttccaacttctatgttcttttggtatgaaattaagcacctaactttaattgtatgcaatagcttttgacttactttcctcccaactgaagttacagcaaaaagttgatgatcaaggcacattgctaaaaactaatctgttttgacatcatgaaaatccatcagaggtaaaactttatgagactttctcttcatgtttttttccattctaaaaaaaaaattgtattaatatccaataaagtatgaattcatatatcaaacttttaaaaatttaccgaaacttgctcattgataaccatggtatctaaatttaattatagatctaaatttaattatagatccttaaactagggtgctaggagaggctctttatcctttcctagttaaaaaatgtacaatctctgctcactgggtcatcttcattttggataattttaataaactgaaaaagcagtacaagtattacttcttttagaatatcaagtataaagtatcatctttaagatgtggtggttaattcctccttattttcatgtagcttacaaacttacagtgtgaatgcaatttttatgttatgcctgtaattcaacctatttttctgtagtcgcctgtgaaaagtgtgtttgttacagctcacctaaccaaaaaatataaactcactttttcgatcattggtgtttcattcagttttccaggttgatcttataaacaagttgatcagttatgtgggaagtgcttttcacttggactcggattgagacacaatgtctcaggacgttcaggctgaaaaaaaatgtttgagatatgccaaatagaaagactcgaagatcacatcctaaagaattgagcaggccgggtgcagtggctcatgcgtataatccagcagtttgggaggccaaggcgggtggatcatgaggtcaggagatcgagaccatcctggctaacacggtgaaaccccatctctactaaaaatacaaaaaattagccgggcgtggtggtgggcgcctgtggtcccagctgctctggaggctgaggcaggagaatggcgtgaacccgggaggcggagtttgcagtgagccgagatcacgccactacactccagcctgtgcaacagagcaagactccatctcaaaaaaacaaacaaacaaaaagaattgagcaataaattgagcaataaattcaggcttcaatatgtacccaaatatagtatttataaagataataaggaggaacctaaagcaattcttctgtataattaaaaatcaaaataatataaaagcatgtacatacatgtaacttctattttaaaatgcaaatggaaacatgtctggcttccttttttttacttaatatattttagtgatgagcccacattgcttatgaaggtactgctctttccattatgattatgtaattttccagccgttagctattattaccagagccacaatgatcatttttgcatagaaacaagttgttaaattgaaaaaattaattaggattccaagacgattgatttcagataccagaaagaggtatctggcaaaaatcccaattggcaatattttcacaaatcttgagctcctcgctgacttccaagttgcaataaaaaataaagggggaatgaacactgagaggattttgtgagaatgatttttgaaggactatcccaatccagaggggtaggtgaggagatgaaggatgctattgtttcacctcattgcacattccaggaaagcttggtgtgtttgcctgcctggaaaccagagctcagggaggctttagctgacttaaaaattggatgcatcattcacttcataggtttagccgttgaaagcttctcaggatcttccaaagtgcatgtatgcacgcacacaccatcatcatcatcagcagcagcagcaataaatatttgctggttctcgaaaggagggtcaaagcttccaacttcggagccctcagtagcagcagtagctagttagttgggcgatggaagaggtgaggtagaaaaagaggagatacgcacttgtatccctcttccccaaaggctgtagacccatgtggtgtggggaggggaggatcagtcttgccctaggagattggtgctgatgaaaatttacaaataatactgcattttgaaacttaaaataacccaggactttttttaattttaatctaagagtgaccaggagatatatgggaccaactggggaaatttcatcagtggtattagaaaaaatttcccccaatgaataaattttttaaaagcacagtggtggacaaaaatacaattgtactttgtttcatcttaccaattgcttttaagaaggttacatacttatctttgctcacatataaagagaacattcatttttaaacaaagacaacatacaatctatggatttccagaacaaagttagaattaatgaatttagactaggaataactgaaactgaatcagtactctagagctacactttccaaaaaggtaagcattagccacatgtgccctttaaattgatgaaaattaacgattcaatttctcagtaaaactagctcgatttcaagtgttcaacagccacatgaagtatgttcaacagctgcatgaatgtagctattatctacctgattggatatgacagatatagcacatttccaaaatcaaaaagtttttggttctcatcacagatagtaaatcatttaattctcataaagcatagtggaaagggaataacaattattattattactacttaatagatgtaaaattgaagattggagagttttagaagctcgatcaggttttttggttccgggtcccattttctttcctctaaaacacattgattgattatcaaggcaagtatgaaatgtatcaaccactttgctctacgtccaaatacaaagaggcgtattctgaaatctagaaatttctaaaagaaggaaactaagtccatctctatgtcatagctttgatggaaaacacaatcttgtatctgtttctaatacttcccattttacaatccataaaatgaacttacagaagttgatttaaccaaaagactgtgaacaaatggaagaagttttagatagcattaatgaattgctaaataactgcacttgtctacactatcctttcactttggtatgattgtcgaagaaactattcactggcttggatgtgcggacatggttttgagaccagactcattttctgctggcatttgaacccagatagcttttacaaatgaagataaataaaattcataataaaatatttattcacactaaacacctaggagtgtgtgggaaaaacagttttactggggaaaggaaatacaggggccagttgaaaaaacacgaagaataattaccagtaagtgaggtttgaaactcatttcctctacaggaagacatggttccaactggtacagaggttaaggttcacattttgcatccttggagacagaatctcaaaaatggaatctaaggtggtcttaagtgcaaaacctcaaaagggtaatttataatccttggagtttaggagtcgaaaacaagggacaaggtgaactctgtccacttctctccattcttacaaccactttcctagttcaggccactgcccttgctctttgtctctagttctgcttcaacttttgctttccaccttcctgaaatgtaaatcacagatgagatcatgtcattgactgaacttaaactcctctgcgtcttctttaggctaaagttcaagttcctcagtctgtgttataagtatgtcatgaccagcctctgcctttctctgcatccttccctcttgcccctcccccatccttgcctctgcccctaccccactgctatgcctcagccttactgaagtgcttgctgctttctgaacgagttctgctcactcttgtttttacaccattgtggatcattttccttttacctgaagcacttcatcctgcttctccctacaaatttcactgtggagctagcatttgaacccagatagctcaaccttcagaacccatttcataaattctgcataattagtccatgggggggacagtctgagagcccctcttggcctcttgtattgcatgatcctgctgcttctttcttccctctctttagttaaaacctcagactgtgtcacatccttcttttgagtgtgaccagctctcattcaccaatgagattcacttaaatttgattcaccaattcagatgacatagtaccacttctctccctttagaatattttttaaaattaaaaaacataataatagaaatccatcccaccaaataacacctagtcatcttggaagtttttaatagggagaggaacacttccttggtaggcttaggttgatacttttctgaatgcaaaatgatattaaaaatgtgcagcagtgagtatggcatggacacttgacctgtcagaatggatgctggccagtgtatggtactcaggtattcttactggatatccaccctgcctggaagcagagaataggcatgaaaatattgaatggctcttagaaacttccaggattagatagcacccatgtttctagctggggttgtgggggatatctcaggtatctgactgtgcatcagtgaaaagatttcttctggctccagcaaaaaaagaaatcaggtgctgatggttgagtgcattacttcatcccccttcttaggtaattacatcactctgtctctcatgtcttgtgatgagtttggcagtttcctaaactaaaaacttcctgtaattaacctacgcactcttgcctgttaaattttgacaacaatttactttctcttccaggatttgtcgttatgaccagtaaattggtaggaaatactgatatcaaaggtctcccagtaacctcttttttccttggaagtcatcgtgtgttttctttggtatttatcagtattttgaagtataacttaatagtgtttgttaatgagggatataactgttatctctttatctataactgtccatttctagtaatctagtaatcttttaaatcttttaaatctactaatcttttaaatctagtaatctagtaatcttttaaaagattcttcgtgttttttcagttagcccctgtatttcctttccccaataaaactgttattcccacacactcctaggtgtttattgtgaataaatattttattatgaattttatttatcttcatctgtaaaaggaaatacatatatatgtatgtatatatacatacatatgtacacacacacacacacacacataatggtatagccacttgtttatctttattctctatcttgttaataattgtataggatttggctaattcatttgagccttaaaacttggtttgcaaggtcgttttcctttataaaagcatgtataactcactactttctgattgattcattttatagaacatttaattttattgtttaaatttatttttaagatatctgtttttactttaaaaataagtttttcttaactttaagaacaagaaaaaggtaaagatttaaagtgaattcttcatcaacatttttgaatgactctgtactctttgactcacctctgtgagttcctcttcattcactttggtttctaatttcatgttagtaagtgctctgctctctctgtgtgcttcctgtttcatttgaagacttccttattctgtcatttcatccttatttcagagcatgccttcctgatgattatgtgacaagggtgtgggtggaggatagtggtgttggagagggcaggttggtttcaggccaagtggttgccaaggcatccattctgccaatcaaggcaagctgagtgcttcgctgctttcttctgggttgaactgaagcctccagtactatcacacacaccaggtcccttctccatgtaatatacataatattgctttagatagctttggctaggacaatgcttactttttccatgagtatgaacaggagaagatcaaaccttgccaactctttatctgtggatcacatttctaccttagtagctaataatttttccttctcctcacagatttcttgtgcaagccttgtatgaaccacataatctgtgtctgtctcaatttcttatctgcaaatggagctaataacattggctgcttttctcctgagatagtcctgaggattaataagctggctttcaaaagcacaagtgtctaagatgataggccctccataaattcaaattactattattgccattctccttacatactggcagctgaataatacactcgcataaaatattatatttacatagacctttacattttgagaagtattttgtaacattaacttagacaagcctttctctctgcacagtctcagcaccactcttctgtggataaaagatttgttaggcatccttggtggatctctctttttcattgagtcttcattgttttgccaattcaagttactattattattttttagtcctattctgtctctgatttgaaggaattgttctacatcaagtctccttgtggtgcatgggatttattctttagattgaattaattagaaaatatacaagtaattttggcttataaattgataaccctgtaaaaatcttgccttgttagaaagcgacagaagaaattataggcgaggctgagatctaaaaggagagctccagaatggaggcttggaccaggggcagaccaggagcttatcaagatacaattgaataatcaaagggtggagcctggacaaaatgtttacttgtctggtaagccttaaatgtttacattggccaattgatcccctttcatcttctcttgcccactaggagaccaacatccattaaactctagtttttggcagtcctgttctgttcattgtttatatcctggactagcatgatatgcttggctctttatccctctatgatctcccatgctgtctgtggatctgatgcctaattctggttcagaaaagcccctgggactttacttaggcaccagtttagtgcctggttttcccagctcccatgaaaggggataaaacattgctttgatcaatatctctttggtaatggtttgcttctctttccactactctcctccatacccacatatcacatgccctcagggatctccagatgatatggtcttcttgagatttcttgccaatacccagacatcagaccctcctgtcattccctttaccacctggattagccactgtggtaactggaggcattctgcccccaggcctttgctgtttaagggtttcaccaccagagggtggtattttcctcttaggatcattgaaattgttcatgttgaaatggtttttattacataaaatatttctataaatgaagtagcctattttctagtgaacaatataagcctgtataatataaaaataaaaataaaaacaatacatggtagatttggaaacatttctcctaaaagccatgatactaagtcatgataaatacgtgattgaaacttttctgtttcacctgaaattgagtttataaatcatgactttgaaatttgaagctcaaatagggcttcttaaactttccgtgatctatgcagagtttgtctgaaatctttgttcatcatgcaagtatattttagttagtttttgtctggaggtgtttgcaaaataagccacactctcagataaattcagtccaagtttattgtgagtaggcgtacgagaacatgttcaggctttactaaatagacaggagatcttgatatccataatgttaaaagctaaagccaggacaacatgtaaaaatgctcgagaaagaaaaacaaatagtcactaagattccacaaaattgttatcttggctaagtttatttaacatacaaaaaacacaaagccatgtgattctttacccaggaggggtcaagaaattggtatccaatagagattccaagggaataggcaaacacagcagcagttgaaaggaaatctgaaaagaagggagggctggcctttgctgcacataggcctgggaggagggaaaatggcagtgctgggcctgagagaaaatattaactgacttgttgactttaggaaaatcttagattctctttagtttttgtcagaaattccaaatagcccaactcttttcaaagaccagaattttaattttcagccaacattgggatggacctttctatttggacaaaaataaacttctagaaatcagggaatttgagttctggtggggtgacctggtcactcactaggtaaatgtttatagataatttgcaacttcatcgtatgtcatttttcaaacttacaaaagacaatgactaaaattgactggtagtagtcaaatgtgtaccatagaaaattaggggttttgtggggtgacttgagaatgctctgttgcagtgaaagtgagtggctgcgaggtgaagtttgtgggctttgatccttttacctttcagccaaaggaactttgctttatttatttttcaaccttatttttttaagttttggggcatatttcatttgagaaaaccggttctccatgcatgatagatatatgtttggaacaatttaaatgatcgctaagctctttttaattctaaagatgtttttctatgacaattaatgataatatatattacatagagcacatacacacatgcatgcatacagatatatacattgttttatatatatatataaaatgggccggccgcacccggcccattgttataaatttatacactatctttctccagtgtgactggatgtacctaattacaaaagtatatagtcaataaaactgaaagttggctgggcgcagtgactcacgcctgtaatcccagcagtttgggaggccgaggtgggcggatcacaaggtcaggagattgagaccatcctggctaacacggtgaaaccccgtctctactaaaaatacaaaaaattagccgggcgtggtggcgggcgcctgtagtcccagctactctggaggctgaggcaggagaatggcgtgaacccaggaggcggagcttgcagtgagccgagatggcgccactgcactccagcctgggagacagcgagaatccatctcaaaaaaataaaataaaatttaaaaaaaacctgaaaattattaccaataaaagctaagccttggaaactaaagataaaatcctaaacctcccacagattgaacaaaccctcatttggccaaagggaccccagagaagtcttgaaaactgagttcccaaccatgatgagacaggaggtcagaaacgctttgttacaccccatccctttgcagtttagacacgacaactgaccagtattaatgttaaaatagagatcacaagactgacagaatggactcttcatggcaataagacaacctaattataaacaggacctaaggccatgccaggcaaggttaagtcacacacccctacacttcaggaataaactatgttctagctgcaacaagttttttctttttttctagcagctaaagaagcattggcctcaagatgagcagtattaaaataatgacaacacatccagctcacagaagctaactgatcccctgttccacaagccataactacagctttgatttcaataacattctcctgatgaaaaaaccaaccatagattgcacacttgtgtgcctttgtgtcctaaaaagaccttttgatgtatagggcctaattgtagtacatttaaatgttatctttaccccaaggtaaacatgggtcatatatacgaatatttgctcaatacgcatgtgtcaggacccccttcatgaatattaacagctcctcctatagactgttgaatacatatgttactttaatttattcaacttaaattcctgtctaaaccctcctcctttgaagtagctgtctctggtctttgtcggatgctatgcttttcagcctgtggaatggccaccttgaaggctataatcttttatgagaaataaagtctcctttctaagctcataaatcctgtagtttttaaagttaacaacttcatgcaataatagcaaggtacggcgggttggaagaggagcataattatattaaacaaacaaacaagaaaaatcagagatgtgagaacttactgcacacaaaacccagaccaagtttccctgataatcaaggtaaaacttaaagcataggggatacttgtttttttttaataagagaaaacgttaagattaggaggaaaaaaattttcctatccccagactttgagaatatcttatatgtggctttatatgaaggaaaatgtgtgacataatgggcaagctttttctgattagaggtttactaaaaatttaggcaaattccacatctcatctttatgacgagaaaaaattcaaggaagtagtgttaagccatcactctataaaggcaattttgttaggaggctgaagtaacatgctctatttttaaaactgccttttgattgcaattgatttaggcataaaactaggagaagtgtgagttgtgaaaggctatcatatcctcttttagtattgagatggcttttaatggaaactacatggtaggcaattttaaattctcattaccaagacgtagttgaaagacagcctttccttattgttgcaagaagacagcaaaatgatgttttgcatgaatgtaaaattcctgagatggatttgcttaatagcttttcactggatctctaatggatgggccaagaggttgaggctgagccagcagctgagtgaatcaggtgtaagcttttaagggtaccatgaaaggagcgaagcctccttaagtgaggctcttcacacatctgccatgggggcagattaaaatgcctcttcgtgtgtttctttctaatgaaaactagaaagaacaaacacatcaggggagtactcctttgtggtcatgttttctatgtttggagtggagtagacaagctgggctccctgccttctgacatcactgatctctgtgtcagaacctggctttccttttaattcttttctttttattgcttaaaattttattatccaagattctataatctaaaattaggatataaaaaaagcggcaaaaacccctcagagcagcatggcttcccaaattctctgcttttcaaatggactccatcgtatttgacaactgagtcagataacggtgacaagataggatgtgggtagttctgtggtggaaaccccctcattttacagatggagacatggaggctcccagcaagtgaggagtcaccgcagatcagagaaccgctggccacaaaccttacctaaattccagatcttgctgtttctgctctacctttctagcatatccacaaaattattaaaatagcaaatgttttctttaaacatggcttcttaaaggtgtgtgtgggggcgggggaataaagatggcagagccggggttggagaacagtgatgtcagctgtttgctttctggctcctaagggttttactttgccattcatgagacaaaaaaaaaaaaaagaaggaatagaaagaggccaaacttccccaagagtctgagtttaccttcctaatgacatgtttatttttccacattttacaaagtgggacatggccctctacaaccaggcctgccttcctgagctttgggcatggcagtcattcccttagtttagctacagctttgacagggtgtctcttataagatcgtagaagctgaattctgaaaaagcttgcatcacttaccattgtctataacaggatgcaacttagatgagaaatgagaattgaaaaacaaacactaagagcaaagttgtgtctcatgaccatcacctcaacataattgttttcacttcttcaaaattccttccaagttttatctgtaatatatacatttttatactgtaatcacagtttatataaactttcaagattagcttttgcacttagtcacattataaacaatttctcatgttgttagaaactttgtaaccattttttataaaggtgacatcatgccctaagttgatagcttataatttatttaattattcatccattaccaaacatttaggttattttcagtttatttttctattatatatgattctctgataaagagttttataaacatagctgtccccttcctcttattttcttgaagaaaatactgattactgagaagggccagaagagttttatgatattattgtataccttctggggacagattctattttgcggggcctaaagtttataccacttggcaacaggggcatcttaagaaaaataatatgaaattataaacataaatcgctagggaactttccaccttgaagggactcatcacagtgaggagccataagatcacttggtgtcagattcacattgtcaaagacattccctcaaatcctgtagtacttttcaatttcatcagtacgggatgagtacttcatccctgaatcttcatgagtaccgtgttttctgatttaattatgttcagcaagtgtagcacaacttaatctggttacatttaatgtgaataatttgcttcagtgtgcatttctttgtttaaaaggccatgtttcagtatctattgctatatagcaaactactccaaaacttagtggctcaaaacaatggttgtattatatttcacaatttggtggctgagagatctagttagggattctctgggtgattcttctacttggcctaatatagactgtagttcttaggctccagatggagtggttggaaagttcaagatgggtacccattcatttctggcacttgggaggggatgactagaagtcagggcttagctgggactgacaagcagagctcctttgtatggtctctccagcgtgacgatcttagggcaatagttctagattttgaaatctgtgaacagcggttttcctatatcttattagttaagcaaatcacaatggctggtctagattcaagggcaatttcaatgagaatagcaaagaattagaggctatcattaaccacagggtgatattttttccctaattgttttcttctttttccttaattgtttacctgctcaataataccctatattggaatttgaaagaataataaagatataagtagagcattaacatggtttcatgaaaataagaaaatatattaatttataacttgcataaatctactaaacgtacttaacattgaaaagtcagaatttctttaataacagacttaaagtcactaacttagagttatattaaatatattacatatagttttatatcctcatccttcatcgtattatcttatttattcgtttattattatgatcctttagcaagatgataaaaaacggatatcaaatttccattagcaactttaggcatagtcgtcctaaataaatactacagaaaaactggcattgaagacagtaggtgtgcaagccacttacctccttgccttcagcgtcgatttctgtcctgtgttcttcttttatgtgttgtaggtttctgataccgcacagattacctttccaaatttttattgccagccgtattttagttagatcttgccagtgagaggtcctggaaagggaaggataaaatgaagacgagagaaagcgtgactcacttctcctttccagcttctgggcctccttccacaacaacttgaagctatggatgcctgcatcctccggcaatttcagtgcccgtagtgcgactgttccctggttccagcccctgtccagtggcactccccttggctataccagcacctgtaagcagagacccactgatagcaccaactcctacagagcagcacctcctcatcagttccaacgccagctacgtagggccaggttgcatttccagactgctgcaaaacacacttcatcccagctgtccaagcacctattgcttggcacccatccatgctccccaaactaacatgggtatgccctcctgtgtttccaggacctcctgagacacctcagaagtgcaagtaggcccatgggttctacaacttcctcttcccttttgtttctctggccctggggatagtaactgcatcctgcaggtgttaatagctgggttatttcacattctgctgtttgatctttcagcctctaaacattttgtaaatagtcccctctgcttgaaatgcctcatgtggattctactgccttactggactcggagtgatagagtaggtgctatgttactgctagtcttttgcagatatgagtaaaatgtccactaagaaaaaatgcttagattagtgcaagtagtgtgacagaatggtgattatatcagcaagccatttgtaaaatactggtgctttgtttctgtgtttttaatatcttcccttgtttatatgctctgtgtacatagtaacaattgtgtttcacaaagaaagattgtatttttacaaaacagaaagcaaacattcttgggagtgatacttatgttccttttcaatgtcaagttgcattttataacagctgaagtcacaggaatatgtccactgattattctgtcattaacagttcacaggcaggctttcaaaaatgaaaaagtgggctgttattaggaaaagagcttgtgatgaaaacctttccattttttttcgtttgataaaaactaaccaattttggctttgttgccattttaaagccatgaactgctccagaatttttatgctttaggattatctctgcaggctgtgggaactgaaaaagccaatgctaattctgttttgaacaagaatcctcaaagagaaatgtttatttgctatgccttggctcatatattcatttgccagttccactaaatttatattgagaaagtttttcatttaatgtcaagattcaataaaaatttattaattaatttgtggttattagatatcatacaaatgctaaaaaaataaatgattaggatcaaatgtcttgaaaaaagaaagctaagaggaaaactgttcaaaattaaacatttattttgccatgattgcaattatctttgatattcagcagatagaaacggcattagtgactatcacaaaggtaataggtttggtgttaggtcacagggattggagtaaagaaaaatagaaatcagagtcccatgtacttcactggatagctttccattgtggactgaatggttgaatccttcagtccaaaatgttgaatccttaattccattgtgacagaattaggaggtgaagcctttgagaagtgatgaggtcatgaaggtggggccctcatgaataggattagtgcccttctaagaagaggacacagagttttccactacatgaaaacatagcaagaagacaacaatctgtaaacaaggaagagggccctcaccaagaacctcacccacctgacaccctgatcttggactttaaatttccaaaatggtgagaaaaaaatgtttaagcctttcagtttaaggtgttttgttacagaagcctgagctaagtctttcttttactctctctctctctcttttttctctctctgtgtatgtgtgtgtgtgtgtgtgtgtgtgtttatgtgtttgtgtatgtctgtctgtctgtctctgtctcttttccccattttttctcctgctcctacgctggcctagaactaagagatggtggaatttaagtatgttacttcttggttatgctttccagagctttcacactgttgctggcatttctttcaggaaagccattcaggcaaactatgtatatatcacatttgaactagatttgcaaatcacctaggaaatctttacaaacctccattgatttgccgcaatgacttttattctattaatgtaatttgtttctttctcagttttcaaggggaaatgaaatttatgcaacagtcattccacaattatttattgagcacctactatgtgctagaaactcttctaagctctggggatacaagagtgaacaaaacagataaataaacaaattgtcactcttttggtgcttgcattctagtatggtgagataggacataaaataaataagtcaaatatatagcatattgtattttgtgagtaacatgaagaaaaataaggcagagaagtacaatgagaagtgtatattattttttttaaaaaataaggaggccaggaaagtcctcataagtaaggcaatattttagcaaatacctaaagatgatgaggaagacatcacacatatcaggggaaagagtgtttttggcagagaagacagcaagtataaaggccctaaggcaagaacatgcctgctgtgttcaagaaatgaaaggtaaggccagtgcagctagagtctacgtgagatgatctcagatgaattcacacaagaaacaaggccagatgttaaagaataaagccatataggctatataactttagcttttgcttgattgagaaaggaagctattacaagattttgaacagacaagtcatatgacccaagtaatataatctgactattttaaggaggagacagtgataagctgcctcgcatgatgacaggtcaagcatgttgagcaatgagagtttaccagtgactttggcaatagaatgtcagaggtgaccttgataaaagcacttttggtaaagtggagaatgggtgaaaattaatagaaggtgttagagagagagagaagaaaaatatttttggataaagggagaaagtactttgtgtgtgtgcctgtttttgctgtaaagggaaggggtgggaactggagaaggaagaaaggaggaaaggcaaagacaggtttgtttgacttttctttaaagatgtaaaaagcatcctgatgttttatgcttatagaaaaggtgcaatagaggaaaatacacttgtaatgctagagagatgcaagagagtttttacaacttctttgagtcgatgagcaggaatggacatgctagtcctgttgagaggtgagacttggctgatagcacgggcagctcacccacagtaatgagaaagaaatccaagcaaaggggttcaaatacaggaagtcaaaagaatgttttgttagaaccaggttgaagttctgtgatatcgtttggctctgtgtccccacccaaatctcaccttgaattggaataatcctcacctgtcaagagtggaaccaggtggagataattgaatcatggggatggtttttcctgtgctcttcttgagatagtgagtgagttgtcaggagatcttgtggttttataaggggctttccccctttttgctcggcacttctccttactgctatcatgtgaaggatgtgtttgcttccccttccaccatgattgtaagtttcccgaggcctccccagccgtgcagaactgtgagtcaattaaacctctttcctttataaattacccagtctcaggcagttctttatagtagggtgagaatggactaattcattctctctgatagttttttcctcttaactaaaatatgaagcaaggtcaccaggggcaaatgacaacagagaagggtgttggagattccacaagaagggagagggagatgtatgtaccagaaacataaagttgcattgtctggcagcatgaagagcccagctggggttaacaaccccaaattgaaagcaagtctgatcagtaggattgtgtgctttccttcagttccaagaagcttctgggttacaataattgggcagagtgttcaatttcaccaaggtcttaagtgtagttccattagctagtcaaagaaactaatagagtgtttagggagtaaaggggcatgcacgaaggtcactctgactgtccttggagtttaagctgtgggaagagggagaaggcttgtgggaaaggcaggcaaaggacaagaagtttgtcagattgataggttgctggtcctgtatagtgaaaggattgttagaatcaaaggattcccatgaaatattaattcatattagagtttaccacaattttaagaatttttttgttcctgttgtggtttcctcttcactctgtttttcattaaatgtattcctatccctctttaattaaaaactagttacaattttattactattgtcctctctatgtaaaataatatcttaatatgaaataatgtatgctcattaaaaattagaaaatatagaaaagtaaaacaaaattagtatggtcttaccatttacatgtgtttacaggtactggcaataattttgaatgcaggtgcttcttcacttatgcttgggttacatcccaataagtccactgtaaattcaaaaaattgtgagttgaaccattgtaagttagggacttcctttatgtcatttcagtcttgtttcttttcatctgattttataaaacatgatagtaattattctatgtattttgttttgtaccatgtcttaagttatttcttcttactatactctcctaagcatacgttatgctgttaaatactttcgtcaagattatttttaatgactgtgtaatattccagtgaaggatgttttataattaattttgtctacattacaggttatttatactaatttgtttgggtattaaaattgtgtagagattaacatctttatatttaggttttcaaaaagtgttatttatattccctaaggaatcttttataagttcattcttcctttttttttcaaacagactaattcaggttcctcaaactaattccttagacattgttgttatttatataaattgtcacagtttccacatagtattttaataattattccagtggatttaactataatagactaattttccatttttaatatgtttggctgtcgtttatttatttgattattttaccttttcaatattatgctacattttttatggtgccctattatgacaaaagccatacattcacaaagccttattattgttttggtgattataacaatactgtaatttttaattacttagtatgagttagtaaacatattattggaccaatttttctgttgaaagtatccaatcctatttagaatgttgttggtcataaatacctcacattacttgtattagaaaacctggaaagtgtcccagttagcaggtccctttcacctcataacaatcaaagatgattttagattataagaggttatggaaaggtaacaggaggaagtaaggaagaaaaacaacttgtgcagccaagaagctaggctttactgaactggaactctatcgtaaatgtaatagtagctctgtccattcggcgataattctgtagttattccttcagaagagcctactcaaggctttctacattagggtccaaggacattcgccatatgcgactttgtgtgtagtcaaaagagtagtcatagagaatgtggaccctggggcaagaatcttgggatttttctcttgtcttctttacttcctaccgggatgatgttgggtaggttaattaatctctatgtatctcagtctccccaactgcaaaatgtagacaataatgttacctattgcacagcattactgtgagggttagaggagataatagataccatgcatttagaagcctgcctgcacaaagcatgaccagtaattgctagctattgtaagtttctgaagatttaagttaacgtacattggacagtctcgtccttacttttgccagatttcttatgttttcaatttctttattttctcatatcttatcttataggtaatgattttaaaatattaaaagtaattgatttcactttgttctctatttttatcctcctccttttataaaaaagcagaaaattttctttttcatatttctttataaattaaaatctgtttaaagaaaaaaaattttttttttaaataaactttgtaagcaccatctcatttttagcttgggcgtccaacccaatcccaagagttttccttatttcttgtctcttttctatgattacatgtcaatttcattcagttgatgcctccttggtttaggtaattgtaatgccaatttttgatgttgtttgaataccggaagatagattttgcaagaataaatatctcaagtattcttttaaaagcttccaaagcagaaatggctgggatattgatagaatttgaaagagcaatctttcttatgtgttcttatgatagcaaagtgtaagcctctgttcaaataacaaataacaattttgggaggaattcaggcttagtttttctacctcttagagagaactgatattatttattcttcacaatcttaccaggagattgaaaagtaatggcgtgtgttctaccctcacgattaaaaaggaaaagttctctgtgaatcataatcaaagaatctttgacctgaagtaagttcaagttgagaatattctcgtctctaagacttagtataataatgtttaaattgcatacatttatgataaaatcaattataatatacctttaaagaaaataagaaataatatgaaatattgtaaaagacgtttcttccagtttccttttgaataaactttccttgggaaaagttacatcatttctttcaaatgtttcatcaatattgctggaaaatggtgctcctacacaaagaaaaatttttgtagttaagagtaaagagtgttgtttaatcagtgaaaatatttcggcagacaaaaggtaaacatttctaacatacaaggagctgaattatatttttctccctctgtgtaccattctcctgaacagatacccaagaaatagcatgagtatagttatacagatataaatgcaagaaatttattagataggttgaaaatttataacaattctttgctgcttgcttctattttttagtgaagtagttagctaagagtttatttgataatgagaaagaaaaaaggagttttgcaagtttgaaataagagtagaagatatgagaaaattgttgcagagactgggagggtgagttaggtagaaggatataagatttggtgtattctttgttgggcacaattgagattgctgctcatgtttaaatccaacaaatttcagcaaaaggtagtgagttagatgttgttaatcttggggtttctcagatgagtatgactgaataaaagtggtctcgggacactgcttgggtgatgggtgcactaaaatttcagaattcaccactatataattcaaccatgtaaaaaaaccacttgtgcttcaaaagctattgaaataatttttttaagtgtgtttgagagttgagagcaaatgactacagtgttggaacttaaaatctaaatagatgaaggaagccaagaaggacccaatgaagtgaggaataatccttaaaagttagaatcaggggccaggtgtggtggctcatgcctgtaatcccagcactttgggaggctgaggtggatgaatcacctgcgttcaagaatttgataccagcctggccaatatggtgaaaccctgtctctactaaaaatacaaaaattagctgggcatggtggcgggcgcctgtgatcccagttacttgggaagctgaggcaggagaattgcttgaacccgggaacggaggctgcagtgaggtgagatcatgccactgcactccagcccgggaaacagagtgagactctccctcaaaaaaaaaaaaaaaagttagaatcaggtattgaaggaccctgacttgaataactgttggaattaggatattacagggaaagaaacgaaagcaagaaaaatacgttgtggagaatttctccttctgatgaatgttaaagcatcttgttgcattagattccatttctacaaaacaaattaccatttaaacttagagatttaaggcaataaccatccattagttcacagttttgcaagtcagaagtctggtacaatgaagcttggccctctgctgaaggtatcacaaggccaaaatcaaggtgtcatttgaaccgaattctcctatggaggctctggggaaaaatctgcttctaagattgtttttgttagtggaaagaattagtttcttgcagctgtaggactgaagtccctgttttcttgccaactacagccaggggccactctcagctcttagaggctgctcatatccctcagtcttcagtccagcaatggtttgtcaaattcttctcatgcttttaatctctgaattcctcttctgcaacgagctagagaagattctgcttttaaagggcctacttcattaagtcgggtacatccaccaaaaattcccttttgccatacaatgtcacgtaatcatggatgaggcatcttatcataatagcagattcaacccacattcacaggaggggattgacatggttgagagtcactgggggtgatcttagaattcaggctaccccactcgtcaaattcaattaagttctatttaaatgtttaatttgaaaaattgagatctttacagaataagaattttctacagtttaatttgtttttacataagatttcccattagtttttgtaaatattgtgtattgtagatattgctgctattgttaatgggattttttttcattacattgtctattctgtgaaagggccatatatgaaaagtgactcccatgtgtcaaaggagcccagaaaccaaagaatgaggaagacaaatcgaggttgttggtattgggtgttttatgggggaaacttacaaacagaagcatggtcttggacggtagcaagacaggcaactcttcgcactgtttgttcccaggcccagggtttatatacagtaggaaagggtatatatggtccagcaagacaattaaaggcaacccttcagaataggcaagaatgcgatgtgcatcatatcctgtaacttgtgcaataatattaaggttgacatgttcttacactaagaacagcaaataggaatcaggaggcattcatgggactggagttaatcagaagtcaacatggtgggttaacagccataatggagtcacttttgtctccatattatcaaattgatttatcactaattttattattattattatactttaagttttagggtacatgtgcacaacgtgcaggtttgttacatatgtatacatgtgccatgttggtgtgctgcacccattaactcgtcatttaacattaggtatatctcctaatgctatccctccaccctccccccaccccacaacagtccccagtgggtgatgttccccttcctgtgtccatgtgttctcattgttcaattcccacctatgagtgagaacacgtggtgtttggttttttgtccttgcgatagtttgctgagaatgatggtttccagcttcatccatgtccctacaaaggacatgaactcatccttttttatggctgcatagtattccatggtgtatatgtgccacattttcttaatccagtctatcactaatttttattatttatcttttatttgacctcctagacttctcattagttctaataatctgtcagttattctcttgaattggttaggagtatcatcatacagtctgtaaataatattttttctctctcttttgaaagttctatgttttaatttatttttattgtttcattgcactggttatgagccctttggttactgtgaaggaaattaacagtaatatggaatctcattacattgtaccttttaaaatgcaaatgtttttaatattttatcattaattgtggtataagagaaaggtttatggcaaatactctttaccagataaaaattttcatctatttctaggttgttggcatatttttatgaaattcaatatggaattttagcaaatgattttttagaatgcattgagataatcatagtttttacatattaaattaatacaatgattgcatgaatatattatcaaatgcttaagcagtcatttgttcctggcaaacctaacttcgttaatatgtattattcatgtaatacacttataagttttatttgttaatattttatgtataatatttaatctaatattcagtggaatttcactacaatattttatactgtaactgtcctttctatcaatataatgcttgttacaaagactccatttttctttgtaatacatattatttatataatgtaagatttttatcactaaaagttttgttagaacctgatatggaatcaaattgtccaggtcagttttagaacatagttttagctggcagtcctatttctttcatgtttatgtgtacattgagaatttttactttataagtaaatgttaattatacacacacacacacacacacacacacagagcacatacatccttagaacagtttttagtatcgccattcaaatttattagcttaaaatcacatttatgctttttcaaaatcatttattgttcttagaatctgtagttatattcttctgtgattttgttttagtttcctttatttctatacatatttcataaacatttgccaatttatatttgccttcttaatgaatcatactttggaattattattattattattgttatttgagatgcaggctcatcctgtcacccatgctggagtgcagtggtgaaatctcacctcactgaaacctctgcttcccggattcaagtgatttttctgtgtcagcctcctgagtaactgggattacagacacgcaccaccacatctggctaatttttttaaatttttagtagagatggggtttcaccatgttgacctggctggtctcaaactcctgacctcaagtgatccacccaccttgttctcccaaagtgctgggattacaggcgtggccactgcgcccaggcacactttagaattattaatcaattaaactgctagttttatgtacaatatttctattttgctatttatatgctttgctaatttaagcctatacatttttttttcttttttttttccttttttttagatggagtcttgctttgtcgcaaggctgaagtacagtggcgcaatctcggctcactgcaacctcctcctcccgggttcaagcaattctcctgcctcagcctcccgagaagctgggactacgggcacgtgccaccacgcccggctaatttttgtgtttttagtagagacggggttttaccgtgttggccaggatggtctcaatctcttgacctcttgatctgcccgcctcggcctcccaaagtgctgggattacaggcatgagacaccatgcctggccattgcctatatatttttgaacatactttctatcattatctgaattgaataagtatattctctcctgaacaaggcaagaattttactttttaattaaaaaatttagcagaattttgatcaagatgagcagcttcaggttttgacactcttttatctctcctaaaaatatcaataaacagctcatagtaaaatagaaaaaaatgtctgggccccaaagcacagttgacaattcatagagcagaattggagcagaaatacagtgtgataaggtgattgaattcacagacctaccacactttgtgtgtgaaagcaagagtgggagctgaattttggctttagtaagtagattgagtcttaaaagatctttgtttgagacagaagaccagaatcttatttgttggttgaaaccactggttgatgtcagctacccttaacccccaaatcttggaagccttttgaaaacaaaaaacaaaaaacaaaaaaaacaacaactcctgctggcttctgtgtggggcttcagatattaacaagaagcagcctaggaaatggaaaatactcagaaacagcctccaatcaggaactgaactgttcaccaggctttttgcatggatctgcaatatatcgaataccatcatgggacagaagcaataccatttagtgacctaagaagcccaatggaggcaaccgaaatccactggacagagagaagagagcacagaattgaggagagaaacgaaacagacaaaataccttctaattaacatgaccttggaaaccaaaattctgaaacatttgaagaaatagaatgctgagtaatatatctaacacagccataattattaagtggacttaatcaaaatgaattaattatataaaataatctgaaaacagtcagattttaaatgatggaattttttttttctgtaagatagcaagaccttattcaaaggacaaatggaaaagaaaaagcactgatgagaatatttagcattgacaaatgtagtcatagtaatggaaacctaatatatggaaaaagaaaacctcaacaaattggacattagcactgatttatttgttgagaacacagcacgaagcaaaagaagataaaagttcataaaagttaataaatctgaagaaaagagtattcatttcatcagatttccagaaaaaaaatccagagaaagtaggatagagaaaatagttgaatgtttttcaggattgaagaaaggtatgagttcttagcatgataaaaaaggtaaatctgggctgggcatgatggctcacatctgtaatcccaacactttgggaggccaagatgggaggatcatctgaggtcaggagttcgagaccaacctgaccaacatggagaaaccccatgtctactaaaaatacaaaattagccaggcgtggtggtgcatgcctgtaatcccagctactcaggaaggctgaggcagaagaatcgcttgaacccgggaggcagaggttgcggtgagccgagatcgcgcctttgcactcctgcctgggcaacaagagcgaaactccatctcaaaaaaacaaaaacaaaaaggttaatctgcataggtgtactccatagtgaaactaaagactctcaagaatttagagaagttctttaaaatttaacagaatgataaaaaactgcctacaaaagaacaccaaccagactgttgaagctgtctcatcaacactaatacatgccgaaagataatgaaataatgtcttcaaaatgttgaaggtatacaactgtaaaccttgttaattcaggacaaaagcatagaacataagaataatgatgaccacagaattgtataaaatgtaggcataaattgaatcaattattctctggagtgtgtgtgtgtgtgtgtgtgtgtgtgtgtgtgtgtgaaataagattaacattctgggcagcaataatagtgtgaaatttttcaataagcagatatttttatgatcattttttgttttagagtattagtaagaaacataaaataaatttatacattcttatgaatatttataagtaagtaggtaaactgagatcttaaaacttactacaaaatgtgtagagtttaaaaacctggaattgggaacaagaggagctattgaacattttattcatctaatagaaggaggaaataaataaaagtaaaaaagtaaacacaaaataaggtaatggagataaatttaaaaatcatgtttttaaatgattttaaagggatggaactcaactatttaaaggtgaagactgccagtcagtgtgaattgtttaaaaaagtccaacaatttggggctggacaaccagtcaaatggttgaaataagaagatgggaaaaaatatgtcaggtaaatactttatttcattggatttatgacttcccctgtaagatgcattattattttatataataccaaaaaaaaaaaaacaacaaaggcagctaaattctgaaattaattgcatatgcatcatgatttcagatatattaaactgtgaaaaaagtgcgttaaaatggtaaagcacaataatcaaaataaagtttgtatagcaatattaatatcacataaaatataaattagaacaaaaaagcacttatagggataaagagaaacaccagagaaaaacaaagaaaaaatcctaagaaaatataaccttcacatacttatatggtttaacagcaaagccctgaactgtttaatataggaagcacaaactgactgaattacaagagactgagacaatttcaaaatcatggtgggagattttatcacatcaacagaaacttaaaaattaaacaggtataaaatagttacaagaatagagtgtatttgaacagcatagtttaaaaagttgatataattagatacaaagagacaaatttcaggccaaatgttatcatttgttatttaatttcagacattctgtgcttgtgtatttccggttttttgactttttattttaaactaatcatagagtcccaggaatttggaaagatagtacaaaatcctatataccttccatctagttcccctaaagggaccatcttacataactgtagcacaatatcaaaaccaggaaattgacacttgtacaaggtgtgtatgtatagctctttgacattttatcacgtgtagatttgtataactgccagtgctattaagatacaaaaccagttcatcactacaaagatctcccttgcggtacccctttatagttacatccactcctcttcccttcaccatccctattctctggcaccactaatctgctcgccatcactataattttatcatttagagtatgtcatgtaaatgaaatcataccttatgcgactggcttgtttcacacagcataatgcctgagatgtatctaagttgttgcatgtgttaatagtttctttcattttatggttgagtaatatttcacggtatgggtgtaacacagttctttaaatcatttactcactgaaggacattttggttgtttccagtttggggctattaaatactaagctgctataaacaattgtgtaaatacatttctatgaaaataagttttcatttctctgggataaacatccagggtgattgctgggcacatggcaagtttatgttgaatttttaaaagacattgcataaggctaatcttttaaattaactattattttatccctattttcagagaactgagaaacatgatgattagtaatacaggctttgaaaacaatagacttgatcaattcaatacgggttgaatctggcactgccatcatcagcagtgagacttgacagattaattaaccctgctacagttctatgccattttatctcatgtatagacttctcttttatttttacgagttttattgaggtataattgatgaagattgtatatatttaagatgcgcaacatgatgttttatgtatatgttgtaaaatgaagttaaattatactctgaccataaaacaatagtctattcagaaacctaaaaatattctctattaataagttttgagagaacatttgttgtacttagtaatttttttacagtttacaaatcactatcatctttaatatctctgacttgatttccacacctgccctatgaaatgggcaccacagcataaacagaggctcaagaggtgcaataatactgaaggatatcgaagaggtcagttgtagaacccacttctaacactgatctctgattttcagtgttgtcttttctttgtagcctacaatggaaatatttttattattgttccagctttatatttgctatattccaaatagttctaaggaattgatttaaggctgctccagcttcaccgtcagcaaacatattagcattaggttttatcactggggccaagagtcatgttaaaatgctatttcttcatccaagtaaaggataagaaggagaaatagaagaaaagcctgctttcaagattaaacactgtgacagtcttctggtgacaggatgaaatgttacctaaaatttttcttggttatttaccagtgccagaggcacaaaaccccctaatatatgaatatatagatatatagtttcatgaacatatatgcatatatgcaattatatgaaaatgctaattttgcaatacatttgaaaatatatcaagagttatatatattagatgcagatatctttgaaaataacctataagtgtttttttatgttctattgcttgatcaattttttaaatctgcctttgcctgtcatattttaaagttgatgatccatgaaaaagaagagaaaaaccaaaacattgattaaatatgtgtatatattttgtacatattcacacacatttattttatgatattggtggtaacagatttcttttaatggttgttggaataatggatagtttggaaaataatgccataaattttgcatcatataccaaaataaaatattgccgggttaaagagttcatcaaaaaaagttaaagccataaggaatcagaagctaatataagttaatattcattttatctcagagtagatgatatctttctaaccataaatatagaaacagaggccaagtcagaaaagatttatagatttgtcaacataaaattagaatatgacataaaatatcgtaaataaaataggagaactgagaagatactgggagatgatatttgggatatgtgatatacaacatatgaagggttgatatatttagtattagaatatttttcaagttcatcaacagaaaactgggaaaatggtagtaaaggattttgcaaaagcaatacaaaataacaaatacatttttttaaaatttaaggatgtaaattgttcttgaaaggcaaagggaaaagagtatttaaattaatgttgataccgtgaatagtcatacacaaatgtgaacattattttgcattcagagatacccacacagtacatgcttttactatatgctttatattttcctttttaataatattttatgtgaatagggaaatgccatttgaaataatacacacaaaacaaaacatcaatagtagattttgggggtgagaattttattttattctcgtacttttctttattaaaaaactctgcaagctgtatatgtttgtatacccacacaaggcattataccatataaaatcttttataccttgcttttgcccataacattataatatctgcaatttcccatatagttatatttttataacattgattttgctggggccatgaaatttagttaaccattttaaaatttctttctcatacctgaattcaaacagtagattcattgtatttgatcctagaagttttaaaatgaacttctcacattccttcccctgaaatatttaagttttgccagatgctgattggggaaagcttcccaacacgattcttacagatgagctgtcatcttattcactgacaaattctgtctctttgtctttatacacatattgcattatcatttaattttaataattacaccaatatttattcataacttattctagaattatgctaagtgctggggtccaaagaggattgagaaagtccctgtgattcaggcaacctcagatcatcaggaagtcacacttaagtgctgaatgttgttgtctgttcatccaactaaccatccatgaacttacctacttctttgaaaccatacacccaaaccaatttttatgaatcaaatctgaatctatatacccaaaggaagcagttgtccacgttatgaacatactcatgtgacgcaactgctcctcaaaagacaggagagttcctttagcctcactttcagagctagtttccccatcatacccaagagcatcaatctcagtgaccccagccagtactaaaacaggttcatggcaccatcatttaaatgaatttattacatttcagagactactggttagttgggccaagatggtatgtggctaggacccaagatcagattgtccattagcacaataggtttgaagcagataatgctaggcaaacacacaattttatgagtggctgaggtcgcactctatttgcaacccactttttgcataagctagaggcagaacaaggacttatgccaaaggcaacctttacatcaccttactatccagaagtgtcactatctagatcttacaattcaaagggaaagaaaagacaaagatattgaccctgacaatcacactaagggaggaagaatttgtccctaaaacctggaacaaaactaatctttcctataatcacaaggctatactagaaagggccatgccccaagaaagagagctgtaaatttttcctttatcatagtgaaatcctatgtctagcacatagtcccgagacatgtttgtgccagggtaaggatgggcatcttcagctgccatatattttattatgtttaataatatgtttttagaaaacaaagcaaaacatgtatattatcacctcataattatgatttggtggctctcaatttatctcccagaaactttttataaaaataaatgaagcctgggatccatctcggatttttgggatgatttctgggcatctgtatttttaaaaatagctctgaaattgattttgatgcagaggaatggttgagaaccccaattttatactaaactgtttagggaaaatgataaggaggtagaaagcaagaacaggacaaaactcctaaacagcagtccaggaagaccccaacctggcaccaggtggtgctgtggggacaactctgaggctttttcccgtctccccagctgatcacaaggaacccactagcttccccagagcagcacaggctctcagcaaggagataggctcctgaccttgagtattccacctgcattaaataaaggggagatggaggaaaaaggagaggaagagctccttcttggagaggttcactgtcactttgggcggttaagtgatggggttcaacttttaggtcaattgaaagaattaaaaatgacagtgatggacaattctgcctattctattctgaatggtttcttttgtattttattttgtattttattctgtttccactagaatttaacacctgaaagtagaataacaaaacataattaatttaaacatgaaattaaagtcattcctatatagctcaaatatatatgtgtgtatatatgtgtgtatatatatgtgcgtatatatatttatatattttattttctccctcatgatggtttaaaatactttaaaaatccatacagatagaaaagagatttacattgaatattttacattctttatgttggactacgtacttatatactaacatgttcctgtaactgtggtaaccagccatcctggtttgctccggactgagaggtttggattttaaaacagggcagtcctgggcaaacccagatcaatggcagctcaccctgcttgtaacccgtatgttcatttgggcagctgtgttttccttttattcctgctgttaagttggactcaatgcctcttattttacactataaatgtttcctgaatcagtgagtaacatggatttttctgaagattgtgtgggagaactagatattagggttgacaatgcatacctctcagtatttccctcagaatattctcattagttatgtctttttatttcgtatttcccttctaggctacaatcacttgtcccaatcctcagtctcctcagttggtttcctttcttacccagggcagttttcctctctcagctttttcctccagacttcttgtaactcacatcatcacttgataccgtgttgaaataagtgaaattttgaagatgtaattgtctctgtgaggccgaggtgggcagatcacctgaggtagggagttcgagaccagcttgacctatatggtgaaaccctgtctctactaaaattacaaaaattagctaggcgtggtggtgggcatctgtaatcccagctacatgggaggctgaggcagaagaattgcttgaacctgggaggtggaggttgcagcgagctgagatcacaccactgcactccaacctgggcgacagaacgagactccatctcaaaaaaaaaaaaacagatataattgtctctaagaaagaaaataatcagccgggcgtggtggctcatgcctgtaatcccagcactttgggaggccgaggcaggcggatcacaaggtcaggagatcgagaccatcctggctaacacggtgaaattccgtctctactaaaaatataaaaaaaaattagctgggcgtggtggcgggcacgtgtagtcccagctactcaggaggctgaggcaggaaaatggtgtgaacctgggaggcggagcttgcagtgagccaagatagcgccactgcactccagcctgggcgacagagcaagactccacctcaaaaaaaaaaaaaagaaaataaaataatcttccagtttctagtaatcagaaatcagtggagcattaataataacaaaaatacttttgttcagctgaatcatatatatgtctatatcaatatccatctttctctatcagttgtctatatttctgaatagatatatgcacacatgtatgcgcattagtatttttcaagtcactgctttgacaaagagttcatactgttgcacaccgttctgtttacaaaaataacaaatggaaacagtgtgattccctgaaacattagaaactagatgtaatcaattgttgagaatttaagggaaattcctgctgtatgaattggatggtgtggtgtaatgagtctctctttaatcttacccattctaccaaattttattcataagctctttctcatagcaaacgttagtgcataaacattctgttttcacttaacagtgaccaaagattcatgtttattctctttcaagtaggtagccttgtcagatgatatgcaaatgattcacatcagtgtttgaagttcaaaccaaggaaaactgtgagtatacacaaaatgtcagagtgtttttctcttggcaaagaatgctgggaatcttacgattaattccatacagtaacaactcagcaagtgttggctaaaaatacttgcttttactgcaaaagtactaacacaaatctaattttaaacgatacaataatttttacattttccccttcagagaggtgaaaagtattgtcaagttgaataatctgttaagctaaaatgacaaactttcacagtgtttattctgtttcctcttttccaatattctttacatatctttgtcagtaaccactcattacattgtctaagaccaacggaattggcacagaagtgaaaaacagagaagaattatcattttaagcagcaactgatgttcattggggatttatgttatttcaatatttacaacaattttttaaaaaagctttattgagatatatttcacgtatcattgtaaccactttttgaagacaatattttaccctcattttgtagatgaggaaatggtgctcagaccagtgaattcatttctaagcattggtctgaagttacgtctgtctattttcaaagactgcgttctttctattgcactccagtgcctctgctgtgatgagtccagtcactcttttggcaggaatcatggcactggtaaaattttctatgaagggtgaagaataggatacagggtcccaagacacaacttgtaagctatcagagattggagtctcaagacatctgattgagaggagaagattcttgaatgggcccagttggcaaagttatttctatatgcactggaataaccaggagggagagaccagaggaaaagcaaggggtcctcttgtgccactttttatacagtatttcatttgatccttatgaacagcatgtggggttattatatgttgatagtaatactaattattacctattttagtttagttctttacagatgataagtagagttccagaaatgttcagtatctttccaagtttatactagaaggactgtaaccagagaattgtaactccaaagcctatattctttctactttacaaaaatgcatttacataaaagaaaggaaagacattgctgactgatgacaaccagtgaggtctcctgatatactgtcaagtgttctaggaagcagtggagctttgcagagaaaacaaatacagaatttggctcagtttgctagaaaagaccatgcaagtgaggaccctacagttacagctttattagccacactataaacccacgtcttgtccaccccttctgaattgggggttgatctttataccttttgaaaagtacaacccagaacacgttttttgcactgaagggtacaggaaagaaaaatgactgcaggtccataactacacaaagtcatatccaactactcttgcaataattaaacttgtccaatcccagggacaagatttgtagctaatttatttctcagagtttgcttgaaacatctattgcttaaagttaaacctgagagacatatcactgggaatattttatggcaacagtggggattaggtaaaagaagtcattaaatgtttttcacaatgaaagtactacagctttgctctgtggccttgaaagttggaaatgtatgctcttgtgtgggagcagtaacaaaactgtttctgaggaaaactgcagtccctatcatggcacagcatgcagaagtagaatgatcttctgctcaggctacattttagctactcatctcaattgtcatctcaaatttactcatctcaattttcacaagagaacgtgactcctatctttaacttagtgaattgtttgggtcttcaaaagaaaaagctgctctggatcttaggcctagaatgtctcagtcagctctgacttgaaaagtggaaagggaaactctgttgagaggaaccaagcatagtgggctttactggactaggtcctgtccttttgggattgtaacctgacatgtgtgcttatcttagaatagggaggcagatagctgtctagctgggcccactcttctccacctgacttgacagaattgcctttgggtgagatgacatcaacacacattaagaaagagctccattaaagagatttactgttgaacatactgtaaaaggtgggaccgaggatactgtccccagtagttacatgctcctcttcacccctctttattccaggtattgctggtgctgctgttaagtggcttctttgtgttctatgatcactgtgaagcttgtaactaatcatgtttaccttattttggtcactttcagaaagtggagagccaaatgtgtggactactgctaataggtatactggaatttacagcatgatgtttgtgaagttgcttttatttgaagttgtcctaccaacttcctgcaaatgtcacccttatttattcacttattttgtttttaaatttttttttttttactgaagaataatatacacttacttgttgtttaaactcattgtgttatttgactatttgtaaatttctcaacatatttttaagccaaggaagtgcatgtgtgttgtgggtatgttcatgcacacacacgtgtaaaatgaacatactgtagggaattcaaataaaaaagacaaataactatcaacctctctgcagcttggttcatcatctgtaagatgagcattcttcatccaaaataatgcttttctcctttcttcatggccccttgtaattttagtcatttctctgggtctgaagagtaaaggttgccaactctgtgaacaaggaccagctacataatttgcagcaccagtgaaaaatgaaaatatgggacctcttgttcaaaacatattaggtatttcaagatggcagtggcagagcattacaccaagcatggggcctatccaagagtggggctctgtgttattgcacaggtcacatgcccatgatgcaggtcctgctgtgaacttggagatcttccggggtcaacactgtggcttgatactactctccagcaacagggtcagggtgtagtctcaaatttcgcttcctctggaagagaagttttaacctataggtagaaagtgttgtgtagagttcaaaaatgtgtttgctagtatctagtatccttaagttcaaagactggtttgctacttagtagctttataatcttgggcatataatgtccctaagactttatttccctacctttaaaatgaggataatggaggccaggcatagtggctcatgcctgtaatcctagcactttgggaggccaaggcaggcagattgcctgagctcaggagttcgagaccagcctgggcaacatggtgaaaccccatctctactaaaatacaaaaaattagctgggcgtggtggcatgcacctgtagtcctggctactcaggaggctgaggtaggagaattgcttgaacccgggaggtggaggttgcagtgagctgagatcacaccactgcactccagcctgggcgacagagcaaaattccatctccattgaaaaaataataataaattaaaaaaaaaataaggatgatggtagagccaactttctagaattgttgcaagtaaacaagaaaagccatgcatgataccagaagtgtggcaagctccaaataaataatgaataatagctcttatgattatcttttaccttttttattttttacaggcccaagatattccttttgtgtatctgttcagggagtcctttataccttttcttccagatctagatttctggatatgttccttgactacatcactaagctgcacttcaaacagtttctgacctactgtttttatatccctgatttagtctcactaatatgatgttatgctgcacaattattatgattttcctgaacttcagttctgccagtgatggaaggataataagatagaaagaagtgatagacatcttgacctggtgatattaacaagatgacgtattgatgaaatgttttgagttcccagggttggaggtatcatagaaattattatggatttctaataccgcttaatgcactgggaggcctgctcccttccctggagaatcttctgaaactctttgccttggggaaaagtaactgctgacatttgccctgtcaggtcttttaaatatttggtcagaatcatcagctgcaacacttgaagtatttaataactgggagaaagtatgcttgtgtatggtgtatactattaaaaattaccaatcagagagtgccactattccatcagaagttgccctagggtaagatccagtaaggccactcacagcatggtaatgtccagtaaaatcataccaggtgtgtatcatcagctgattatgattcctttgtgggcctttttaaaaaaatactggttgcatttacaagtaatacaatgttacttgggcaggtttggcatttggcaggtgaaggaaaagtctactagtccaacagttgctctcctgtcacctataagagttatagcctacatggacatgtttttattatcacatagatcaagagttaaatacagtacaaattcatggaaatcatcgaggtttcaggtattcaagcactaactgaaaaatactttgaacctaccagctggctaacactagcaattttcacaatgtaattactatcataaaaaattcaaaggacacattttaaagaaataattcttttaagtgtattgttttcttggttacttattccaaacactgcattgctccccaccccttatcctcacaaaaaatatcttctgacttttttgctaagttgtacatttggtaaatgtttctagttgcttagggcctagtttaaatagtaaaataaataagggcaaaactttgttggtttcttaaggaaaaaagtaatggatcatgcaaaatcagcataagtatttttaaaaggcatattgaaaaaccatgtcccaaattaaatgaatactagagtactctattctcatttactcattccaacaaagactgactcatgtttctctagataaagtaaaaaaaaaaatcctgttttgggcggcaattgtcattgagtatggggtttaattggaagaaaacatagggaaatgctaaatgtggctaatgtgatttgcacctgtgtaaacaagcaatgccattgtccaggcagatcttggtccttccagtcgaggatttttttttttcccctataccacctctccttggattcatagaaaaaaatttagatttaggatggtactgtgagggatggagggatgtgtttgtgtagagaaagattatgagagagaggatttgttgtgggatagtgagagtggctagggaaaccatttggctagggaaggagcttttagaatggctttcagaatgtggttctcagcatgtgccccttggaaccgaaccacagtatcagcatcatttgacagctttgttagaaataaaattcttgtgcacaatcccagaccttctggattagaaacactggggtggttccaaagggttgtttgattaagccttccaagtgatcctggtgccactgagttttggaacaactaccttgaaggacagtgaagacctgcttgagtgactggagaataaggataatccacaaagaatctcagctaacgaccctttggtgcctttgtttctgagaggttatgatccttcaaggtcatagctgcgtaaggcatcattcctggtttttatgtggttgaggacttctacctacattccatttggttataactatttttcatatcaacggttatttgcctcaaaggaatcctcagtacatattgctcattttgctctttcctcataaaaaaaaaaagagtttaggtagtttactaagttgattttttaagaatatattttatcttttcgaaaatagttttccatttagacatttgttcctcattttaatttagtttgttacattttgctgaggaacttgagctcagcttttctacctcaaagttttgactacttattctgtgctaaaaacttttaattttggacattatatttggtaaaatcaaccacagcatttggaaggtctgccaggaaatttgaggtttccgtgcaacttgaatattgcataattcaacattttacccattttttcgatgtagtttccccaatcagggaaagaaatggttattgcaacattggatttttttaagcatgccaccttatgagacaatttttggatttatttaattatcatgcctggaaacacatgcttccctccttttccttttctttttcttttattccttttccctgttttccatcttgttttaattttttctttcatttttatagatcagaaaaggcttctgctttctttaaaaaataaaactacttgaaaagaaaaaaatcaagaattagaaagaagagtataacaataaagaaggaggggtcacaggtgaacgagatgtggtcaacacacacaaaggagaacaaaaagtaaggtttaaagtaactgggccgggcgtggtggctcatgcctgtaatcccagcactttggtaggccaaggtgggcaaatcacctgaggtcaggagttcgagaccagcctggccaacatggtgaaaccctgtctctactaaaaatacaaacatcagacaggactggtggtgggcgcctgtaatcccggctactctggaggctcaggcatgagaatcacttgaacctaggaagtagagtttacagtgagctgagatcacaccactgtactccagcctgggcgatatagcgagacttcatctctgaataaataaacaaataatgataatttaaaaaataactggaaatgtgaactagaaggtgggacagtctcagaaggtacattgggaatcttgagtctgacatagggtatgtggcatcttaagttatgggctgcatatagtagttataacatgaacaagtaacttccggtcagtggctcacttgctaatcaatcttgtggtttagttacgttctattgctgagactctgaaagtcatatttataatacctgtttttcaatgttgtcatgggatgaagagaaattatatatgtaaagaaggctgagtcccagacatgagatactgactaccagtatgtgttcatacttttagttgtgattcatctgtttcaatagttgtatgatacttcattgtgttaatatgccacaatttatttatccacttatatggcaaaggatattctggggaatatcctagggatttcagttttcttgataatgtaatgaatattcatgtatatctctttgatgcacatctgcagagttttcactaaaacaaataactgggattggaattgttgggtactaggctgtaagcctatttcctagacaatgtcagattaacttccaagtggttgcacatattgacacttccacaacaagtatataggctttccctttgttgcacatatttgtcaataattggtgttactagactaaaatatttgcaaatttcataggtaaaaattgtgtttcttggggtttcattttgcgttttcctaattaccaatgagattgatcatatttccatatatctaggggccattgtgtttccattttttgagaaatgttcatttagagaattttttcaaaaatttctatagtgttgttttattttgtttattgatttgcgggaatctttgatatattttggaatccaattatttttcctttttcagtcatgtgcaatgaaaataaattgtcctagttttggcttgtgtttttactgatgtcctttgctatataggatgtcttattctaatgtgtggttttattttttaggatttgcatattgcataagtgtgtgtgccttgtttaagaaattctctccttcccagaaaacataaagacgatctctagactatcttccaaattttaaggttttgttttcacttttaggttttttaatcccttggcatttattttctgtgcacaggatgagatagtgatcaatgtaatatttttttagcatgcacaacaaatggcaacatcactgtttaatgaataatccaccatttccacaccactctgtttggccacctgtgccatgtatcaatccttcatataagggtgggtctgattctgagatctctattctgtgtccttcatatatttatgttccacttccatgttgtcttacttagagcctatttatgataaatgctgatatctgataggtagtgcagttacttttgtcatgctcttcttctggattgagtattagctctttgcttttctatgtaaatattaaaatagcttaagaagttattgctgctgtatgtgttgttaaacaacatgcttcaaaacaatatgctctatgcaataaatacatacaattttatccattgagaaataaataaaattttaactattaaaaaagaagtaacaaatacacatacacatttacgtgcaatttttcatggaactgcatcgaatgtatacaaggatttaggggaaaatttttagtttgtgatatttagtcctccaatcgccaaacaggaaatgtttatttacttagttttcaacttacttttttgttgttgttgttgttgtccttggaattctcattaattgcttttatatgggatcagtaatatatttccagatttggttattggtattaatctggaatttgatcattttttagtggagtgctaacacatattttagtatatctagtcgagtatcctaccaggagtagaagatttatatagaggattttcacatgtagttctttatagaaatacgtatgatgtctttgagtttattttctctgccagcctgtatatgtatgcttacaaaaaatacttatctatttactttgtaggtggaaaaatgctaatcactgaaagaaaacattttcggtcaggaagaattgcacaaagtatgtctgaagcaaatttgattgacatggaagctggaaaactctcaaaaagttgcaatattacaggtatgggaatttataactgttgtgatttgtccatgtaagtatatgaaattcatcaccaataattgttgaaggtctacctctgaaaatgctggaagatgaaaagaattataaaatcttgtttttatcatagaaatagttaaaaagatgtgcaaaataaaatagcacagccaacagattatgataaatattataaaaaggaaaaatgttgttaataaatgagtgttatatgcaataactataatgaatttgggggtaaaaaggctctctgaaggttgattgacctaggaaatcttcatggagcatcaaaaaattaacctgatcctcagaggaaaagtaagttttaagagagttaggggtaattgtattaaagaaaagtgtgaatataagagaaatgccacctttatttttcaaaatccgtcttctaatttttagcatataacacttaaaaacatttcaattaaggtaatgtttctatgtatattaaacaaaagaaattctgacagtttgcttgaattattttttcagtagaacttctgaaaatttggttggctcttctgcctgtctctaaaagcagcactagcttcacaaagtctacagagtctttataattatttactaagaaatgaccaagtacgagttgctctacacaaacaaaaaatggcttcaatgttgtgagatatctagaaattcttataatagaaatgtaaatattttaatgttacaaattcttaagacacttactttccaaaataataatgcttcaatttctagtggtaaaattattatttgccattgcaagcttgagtgcaatgaattcatttgatcaataaaaccaatggtggtctaaattttcaatgttcattttatgaattccttttcctgaaaaatgttaataacatttcaatacaaaattatagaattatctaataaattaatgactttctaacttagcatattgttttaaacgttattttaaatattaacagatgtatttgatattttctacatattcaatattatctgaaaaggaaaatattaaattaatattctgaatgtaatgaaaccaacaattcagtgcttagaaaaatatggataattgaataactgatttattctatttgaccagaaatttgcttttgtaaacatgatacataaaataataaagcataagcacatgctagtctgagtcattttcaagaaaatgtgttaaatatattattaggtcatattaaatatttatttgtttagtttataaatcatgatgtcttaaaataacattacatatgttcaaaaaataacctggtagaaaaaatattcttctctcattacatataaatttgagcaaatttaacattgagtttatgttagctagtagactagagatcagaaagaaaaatgaaaagtaagtcctgaatttttaagctatgggaaaaattaatcttgattgtaactcacagtgccaccttatctttgttttgctttgtctttccttaaataacaagaatgccaggacccagacttgcttcacaattggccggatgctttcacccttcgtggtaataatgcttccaaagttgcaaatccattctggaatcaactgtctgcttctaacccatttttggatgacataactcaactaagaaataacaggaagagaaataatatttccatcttaaaggaagatccttttcttttctgtagagaaatagaaaatggaaattcttttgattcctccggtgatgaacttgatgtgcatcagttacttaggcagacttcctcaagaaattctggaagatctaaaagtgtttcagaacttctggacattttagacgacacagcacatgcccatcagagtatacataactctgaccagatcctactacacgacttagagtggcttaaaaatgatcgggaggcttataaaatggcttggttaagtcaacgccagctggcccgctcctgccttgatttgaatacaattagtcagagccctggatgggcccagacacaacttgcggaggtcaccatagcttgcaaagtaaaccatcaaggagggtcagtacaattacctgaatcagacatcactgttcatgtgccccaaggtcatgtggctgtgggagaattccaagaggtgtctctaagggctttccttgatccgccacacatgcttaaccatgatctttcgtgcactgtgagcccgttgttggaaatcatgttaggcaacctcaatacaatggaagcccttttgctggagatgaaaattggggctgaagtaagaaaggatcctttcagccaagtcatgacagaaatggtgtgtttacacagcttgggtaaagaaggcccttttaaagttttaagcaactgctacatttataaagacaccatccaagtcaagctaatcgacttgagtcaggtaatgtatctagtggttgctgcacaagctaaagctcttccgtcaccagctgccaccatttgggattatatccacaaaaccacctcaattggaatttatggacccaaatatatccatcccagttttactgttgttttaacagtttgtggacacaattatatgccaggacagcttacaatttctgatattaagaagggtggaaaaaacatatctccagttgtgtttcagctctgggggaagcagtcatttttacttgacaagccacaagatttaagtatttctattttttcctgtgatcctgattttgaagtaaagacagaaggagaaaggaaagaaattaaacaaaagcagttggaagcaggtgaagtagttcatcaacaatttttattttctttagttgagcacagagagatgcacttgtttgatttttgtgttcaagtggagcctcccaatggtgaaccagttgcacagttctctatcactactcctgatccaaccccaaacctaaaaagactctcgaatctgccaggctatttgcagaagaaggaggaaatcaagtctgctcctttatcaccaaaaattcttgttaaatatcctacatttcaagataaaacattgaactttagcaactatggggtaaccctgaaggcagtgctaagacaaagcaagattgattacttccttgaatatttcaaaggggacacaatagctctcctcggggaaggtaaggtaaaagctattggtcagtccaaagtgaaagaatggtatgtaggagtcctcagaggtaagattggacttgtacactgcaaaaatgtcaaggtgatttcaaaggagcaagtaatgtttatgtcagatagtgtctttacaaccagaaatcttcttgaacagattgtcctgcctttaaaaaaattgacttatatctactcagttgtattaaccttggtgtcagaaaaagtttatgattggaaagttttagctgatgtcctgggttactcacatctgtccctggaagattttgatcaaattcaagcagacaaagaatcagagaaagtttcttatgttataaagaagttaaaggaagattgccacacagagagaaatacaaggaagtttctgtatgaacttattgtggtgagtattgcttgatcatggtaatgaattgccatcgagaattgtattaacttgacaatatttataactgaacatgtgagaggagaaatgtttaaaaattcaacagtcttaaatacattaaagacactttatagcaaatatagtttttcctacatgatcataaaactggtttcttaaacttgagattcaactgtgatttccccaaaaaccaggatcatcttttaaaagaaaataaaaagttctgtttgtgctgggcttaacagttcagatacaacttctcttcctgtctcaaatatttagacaactcttaagataccagagaggctccataacatgaaagcaaactaaagagaactaacttggccattgttagggatctacttttcagtgtgtgtgggatttttttctttctttcttttttttttttttttttttttgagacaaagtctcggtctgttgcccaggctggagtgcagtggcacgatcacagctcactgcagtttcaacctccagggctcagctgcccaagtaactcagactgcaggcatgtgccgccatgcctgggtattttttttttttttttaagggatgagtgtctcactatgtttcccaagatgctcttgaactcctggcctcaagcaatcttcccacctttgcctcccaaagtgctgaaattacagccatgagccaccacacctggctgtttcttttttttaatgtattaccaatatcctttagcaatttaatattcttatgtatacaatgcattacagcctaaacaataatattagtaattctcatcttaatcctcatgttttaataggactcccagtgccaaattctttagtgtagtattcaacccagtggaaggctcagtgtagaattacaaagtactttttacctttaaagtagaaattcaatattttataaaaataaaaaaaatcaagatcatatttctaaaaatggttaaaacatgagtgtaaaaataaaaatgattgttaatgcttctctagtgcttatttagccattaacaactctatggggtaagtatagctagtatcttcatcttataggtcgaagaaaccaagtcttaaaaagttagacaatttgcccacgtcctacagttgcctattcttatagatgggatttgaatattttttggtttcaaaatcatgcgtaaagccactatgccttcatgaaacaaagtaatgtgtgtgtgtataaaaatgtttgtataagtactgtgtatgtgtaggtatttgtattaaatattataattgtgaaaggctggtgctctgtagaaggtaaataaaattatataggcaggttcatgcaaaggagcaaagttttaatcaagatgcaaaagaagtagaaaatatttggagaacaaatttaatctgtggcattaacaatgattcatataataaataaatatatataacattatctctctttcaatatttttgatgattctacagtgatacttagagaagttgaaattcaaaagctcctatatccagttgctaagttgatagattttttatggtgtgctgcattcttacctaccctgggacattcagaactattggagactgaatgttagaagctgctctacctggtggaagctgcgtgtgcattttgtaatagctcattaactctcatagctcatatttaacattcacctgcaaaggtttgaattggaaaattaatttcttttgtttttttagtggcctaaaaatgttgtaatggccaaaggtcattaatgatggtctgaaagttcaagcctgatcatacctgtatattttggggtatgataattaccagagtgcctcaagcggctaattagaaaatctagtagagactccattcaagcggggagcttccaagctttagtggaggtttcaggatttctgtatgaagaggctcaggcctggttctctgactggcaggtgatggagcatggggtatagagttgtctcttgaaactttatttgcatagtaaatatacatttttctaggattgtatattgatttggtgtggcagggagcgacccgataagctgaaaaagactgtgggatccaaacccttcagtcatctcttgacattgagactggctgtccttatatacttgacactctctaaagcacttcagcatccaatttgattttcacaatgattatggaagtttagacaaagtggaattaacactacattgattttaaaaatcattaaatagagatactgtgtgatgcatgtaaagtcttatactatgtggagctggattttaaactcaggttttatggctccaagtacagatcttttccctaaaacaagaaactggaatataaagtagtaaccccactccacagtttactaaaagcaccatcaggggcccgctagctcagtattgtttctcactgaggctataactcttcagtataaatgtatggatccatttatgtatcaaaaccatgggtagtccttctaattgcatactttcaggggaatgaacatgctatcaactttcatagttgctttacttgcttattcattttaacttattgtttcatattggtagataaagctccaaagtgccattaaataatgaggggctaccaaacatgtttacagtagttccccttatccacagtttcactttctgtggtttgggttacctaccatcaaccatgattgacaaataggtgagtagagtacaataaggtattttgaaagagagaggccacattcacataacatttattagagtatattgttatgatcgttatattttattactagttattgttgttaatctcttactgcgcctaatttataaattaaacttttccataggtgtgtatgtataggaaaaaacacagtgtgtataaaatttggtactatctgcagtttcaggcatccactggacagccttgaaatgtgactcctttggattcttggatctccttggattccccctcctaagggggagctactctatttgctcatttgaacaaagaagaggtatagatagatgtaatcccatattttaaaaatggtactcaaggcaaaacacaaacttgtagacttgtttgaaacatgcatggttaggtaagagcctgatggttttctattttgcattgtagaagactaggtgttttgtctttaataccttgtactttatgtttaataccattatattggtgatgagggagagtatttttaataaatttatatatatatattttaaacttataaacatcaatagctttgttcaaagttgaaggagtgtctcttttttttaaacacagcaggcatgattctgggatgttttaagtcatattttggtgaaaatagaataatatttaccatcaccagttcacatacactttaaagaaattcttgtagccaatcctctcctagaacgaggctttatttcttgtgagtaaataactaatcctagagtgataaattagagactgccggaacttcagagtaccattggaagtgtgtaatttaacttccttttttcacaattaaagatacaaagacacatattagttaagtggtttatccaaggtcctataattagccactgaattagttctaaatctcccctaactctggcttagttatgtctactgtagtttgcttatagaatttgcttaaatgtgaatcaactccttgagctttagaaaactcgattatacgtgtagtgaaaaaaaaggactcccatttgtagaatatgtaataaaaattccaatttatagagagaaaagcccaagttagttgcttttaattgtgacatgtaattgttgctgcaggctcttctgaaaatggattgccaagagttagtcgcacgtctcatccaagaagctgctgttctgacttcagctgtcaagcttggaaaaggctggagggaactagctgaaaagttagtacgactcacaaagcaacaaatggaggcatatgaaattcctcatcgaggaaacactggagatgttgctgttgaggtaagacttctgtttgtgtaattcaatagtgaaaagttgcagaccaagtaacactaatgtaatcaaacccataccacattcacggattcactgggggaatgtccaagatgatccactaactgaatcactgcactagtaactcatcagtactatctgaaataaacacacacactcttaaaaggcattgagagcccttaaaatattgatgtttcttcttttggatttcatattctcatggcctttgatcaatgaattaattgatcaaattgggccagtaagtggggatggctataagaacttgagtcataaaacaggtaaattttgaaggtgggagacaggatcaagtcaggacaatagaggaagacataatgatatgtacttatcggcctcaggcataaacttagtcacttgcgataactaatgctcagggacaagaagtagtaagaaagtggatgtagagccactggtgatgagagattgataactaagagcttcattatctccttcacaatgttgcctacagtaactacaggcatcagttgcagaatgttagcacttagtacaaagtaaatatttaccatgaaaatattgtttttatcaaaacaaatgtatgctgttaggcacaagttaaacacatatttttctccagattaccataaagaactgggagtcaatttttattgaattaaataaataaaaatattccagtgaagggcacatgtaaaatattctgtatctttctctcaaatgaacaagcattttgaagatatttatgtttaaggaaatcttctctctattagagatgacttggtgagagcagaagctgtattcttcactttgtttttggcgtagatctgggtattaatttttggagaaaattttcttgcttcgatgcaaccattccagttgggtgaacaggacaaaaccacctttgcatgaaaagtagagtcaaatcaagtcagctgaattccagcagctgcagtggaagtgtcagcaggctggtttctgagttcctgcagcctggctctccagccaggacttctccaaaataagactctttagccaggagcaaccagggactgaggatgtctttcccctcagagactacatttatctccataaacttagaagggcattacagcctataaataagcataatatagcatttggtgcagtacacaaaatggactcaagtgtttacagaatgagatgaaagataggaagcctttaagaaggaaaaacaaatattatgagggatacgctcttctgattcggacatttcagttaactgatgaaaaagttgtctaattgaaagcaggacctttttttcttaataaggttctgttttgaaagagttttgttgagagttatttatcagagttatttattctgtcagcctccttaagcatctggcttctctctaattgtggttgtttatagtttgtcttcccctaaatcttgatggaggccagcaaaccacccacttttccattatttacttttgcacagcccaaatcataaatgactaagtctttgcctgaggctgataaacactcagaagcagaaaggaaagcccctaggtgtctttctatgatagttcaacttattgtgattaatagtaatagtcatcactcagattcatgttattaaatacttagaaaaatccacagtatattggcctgaggtcattccaaataatatacagaaatcttacgtacgaggtcacttaactaatgggtaaatatatgctaatttccaacctcctaaaaaatagctgtataatttttctctttgggaggagattcctaaatatgatcaatttacaattcaagtagttgatttcaaagcacactgatattagttctgggtagggggtgcagagggagggaagtgcactggggcagggagataattaggtctagcagttgctgggccgctttttttcctgtatgtcatttcctcagagggcacacactccaaaaactgccttctatgtgtgccaatgcctgcagttgagctgtttcgcttactttctctcctttaacttctttctcttccctttgttctatttttattgtatcttagggagagttatctggcactgactccgtgacagacactgttctggaaatattacaaaaattaattaatgtaatcctttcaataaaaactcatggggcagacactaatatctaagatatggagaggataagtaacttgcttaaacatacacagctggaaagtcctggaaccatgtttagagcacagacatttgacttcagagtccatgactttaaccattacactctgtccatcactgtttaatatggtgactatgttgcagagtcagaaggtgcggccagggttaagcaacttgtttcattttttatttgtcctcttttcaggccatgtcaagtagccatgatactatcaaaaattgcctcaaaattaaatctttaccaagcctcaagctggttaaaaaatgaagtatattaataataaatttgtcagattttctgaacaccttaaccatttcttaattttttctaaggtgaagaaaaagcctctctttggaaacttttgagaatgtcacttttgaaattaaccatctcctcaagttaaattttaagaaatgttactcgacttttctaatgacatggtaattactacataaaagcaaagctgtaaagcttggaatctgataataagcaaagtatgtttttcagagtatttctttcagaaaaaatgcacttacactatacaaagatgtcactattgccaaggttcttccgtgaaagttagtgaaaatttattggcattttctgaatatatttagagttttaattttttaaaaaaggaatcaatagcatattagaaaaatagctcactttttaaatgttgaattttacaaggggacatgctggggattcagagataagaaattcactggcctaaattgggtgctcttcacttagccttctagggatggttaccacaaatgacaatactttttctatggctccctcattggcccccttgcttaacaatatagattatgccatttttatcttgtttaataaggacacatattcaccaaggacactaaagtttcacttcctttcttttttttttttttttctcctttgagacagtgtctggctctgtcacccaggctggagtgcaatggcacaatctcagctctctgtaacctccacctcccaggttcaagagattctcctgcctcagcctcccaagtagctgggattacaggcgcatgccaccatacctgcctgatttttgtatttttagtagagatgggtgtttcaccatgttggccaggctggtctcgaactcctgacctcaggtgatccactcacctcggcctcccaaattgctggcattacaggtgtgagccaccactctggcctcacttcctttcttcaattacctttgcccactgggctctacctcagccacaggcaccaatagtcctgttgataatagtttcttatctgacctgccagaatgggccactctcccaatggaagccagcgaagtcaatgttcctaatggtaattttttttcgtctcggaaattactcacctgtagagattcataattgggaagatgtattttaagtctatttgtagtcaccatttaatcaatgcagatctaatactcctttgtatcttctattcacaacctgttcctcattttctgactggccgctggagagttcaaagtactttgttccaagtctagattaaagataagaaagttgttgattttcaagaagttttagtcattttctataagtgaatgaattccacatggaattctttccacttatttagtatcttatatctgtgtcctagccttcagtatttaattcatccatatacttaacgcttattctgggtctatcagttctggacattggtttaggagccgtaaaaaacacacaatatgattattttttccttaaaaaccaggttttactttggcctgggaattgggataaactgttaatatttgaattgttataatatttcttaaaagtataggactagatgacaatgttaatagttgtaacttaccaaatgttcattgtcagctagtcattatgagcattttctttacagtatctctattatttcaatatactttgtaaggaaaacattatagccatctgctctttacatatatacaaactgaaggtgaatgtatttgtgtaatttatccagttacatggctattaagggcaagtacttagatctgaattcacgttgtcttatataaagtcctaaccactgtattatactaatgataagccctttcaaatttaacttacttaaaaaatatcaaagtggtgaggagtaattaggagacatgctagctttgaaggatgggtggcctttgagtaattggagaggaatagaagtagacttcagtgcttctaaatatcagtgagctctagggaccactgagaagatgtggcctggaggggagagttcaccttactaattactgggtgatgtggtcaggtacatatgttggtatcaatggaggggagtcttcagtgactaccagagcatagaggttaagattcttggctggacttctgttccacctctaccatctatcagccctcaagccttgggcaaattactttacttttctgggaatctattttgtgtgtctgtgaagtaaggagaataatactatcttactcactggatgtttagaagatcaaatgagataataaatgtgtaatatttgggacaatgttttgcatattgtaatcactaaatacatattatttattattttaatgaagaggaagaggaaaaggtgaatttgataactatataactttgagtaatttttggaaaatagaataaaatacactgtttttttagtaatgtgactgagagtgcctataggaagaatgtaaggaaaaagttagcagttatttcaaggtttctcatctgagaaactggcagaatagcaatgcatggaaaaaaatgagataaagtcttggctgatcagcttatttcttatgggcttaacaacatttaattttccttggaaattatctctcgcaaaagttaaaagaaatgtccttgggctgtatggttttctggcttacatggcaacttctggattctgcttacagggatgttgaattatcaaggtctgtatcagggcctggttcagttctagccttggtacttaattcttttgtttgctgttcttttgaaatgagaaatatatttataatttcttagagaagggaaaagtattatatggaaattcacataccagttgtaaaatgtatagaatgatatctcaaatctccattgtttgaactagagatttggcacagtgatgttatttagattaccattgtctactttgtacaatttagattaccatgtctactttgtacaattctatacttgttacaaactttaatttcaaaaagatactccattttgggaggaatgaggtaggaaagaaaacaaagatagcacagtgaaatttctggggtaacacattgtattcctatgatctttgacttaattctatattatacactgaaaatcaaatagaaataacatgcatattaagttaaacattattaagaaaattcaaaatggatttaaagacactatttaattttgactttaggttttctttttcaagctttagtactagggaacataaacaataaggaatttcagaaaaccaaaatccagctatgtgtaagaccaaaatcagcatttgttagaactgcttaataatgaaataaagttgtggcaatactttagtaaaatggccctagatttatagcaaggttacctgggttcttttcctggatagttgactgtgattttgtttcttaactttaaactcaactataattagcattaattgagcacttggtgtgtgccaaaaacatttacatccattcctttgtatacttagcaattcttttatagcattgggtacaccttttttctcatttgccagaaggggaaagcaagggcctaaagaaaggtgatagcttacctaagatcctggagctactaaaccaagagtctagatttaaaccaagatgtgtgccgctaaatccagagctcttgacactgtattttttcatttgttttaatgtttacattgaaaaattaaattgaaggagcccaatttctttaaacattggtgtcagttgtctccatgaatatatgtttttggcaggggcatgggtggcagtgatgatgaggaggcaatgaggaatcctcccaactaggaattggtaagatggcttaaccagcaggttttcctataatgttagactatttaagcagatgcactagcaaggaataggtcctctgtcttcctctggctcatgcttaacccctgaagttccaagtggttattctcacccaaatttagctggttgtcctcaaatagactttttcaatggaatcttgtgtcaagttttaaccaagcagcatctccctcgtgaggacataggggcccccagatatgttagcctcccttctcttctgaagacaacagcaatcttaccttcaacaatatttatgtacttactaattataggtaatgttaaatgttaagtgttaaagcttacctgaatattgtaaatgatgtactgaggatagaacacatgaaataatcattaagaaggcaaccttgccttaatacttcttcagctaatggtactgaaaatgaagtgttgttcctgtaagtttataggagaagtaagtggattactaatcctttaatgtgacaaaatgtaattatccaaaagtagttaaaaccaattgcattctttatgctattcatattttataagctaaaaaaagacatacagtgctatgctgaaatctgaatttcttctactcatgtggcatttcattttctagtgcattttctaatgagtcttattggcttctgggaatgagcactctaaatttggaaaactatgtatgttttgcctttattcctatttcatttcttttggcatcccacttattactttttattgctccattactttttattttgtcctataacactgaaaagataacctaagacacacttcttccacacaaaagcttgaactttggaaaactgctcaactttgtatgttaaatacttactcacgctgctgcccttttttataaaaagaaaagcacatagatgaaaattaacaactttgtgcttttatcagcctcacgcttcctattcaagaatgaaactgcaacatcatgaagttaccattaaaaatctaagaatagaggcataagaatgcagcctatgtattaaatatttgtgatagaaatgagaaggctgagataatttttgtggttaagaataatttaacaactaaaaaacaagccctcctgagagggctttcctttagatttttcaaaacacaagtgtagagtttctgcatatcttttctaatcataacattgagcaagagaggaacaactatttttaaaacacagaatagatacaagacaacataaatctggaagagatcttggctgtctgcaactcctttctagccttcggaggattaaatgttagtcagtccggaaagaaaattatttattctacgcattttattccttcaaacatttccagaaaagatgacttcattttctttgtaatttattaaaaaatttagaattttttgtgaccttactgggtagatattttagggcaaatttcatagagtttattgttaattaatgtacacaaattacctcttatgtctctgccttggataaaatgtatttactgtttaagaaaaccagaatgaaatgagataaaaaatgcagaaaaaataaaagtacctttagaacttgtgtccaaatgttcatatatctattccacaaaggacaattaaacaactgattagcctatttactgtattgaagagacctggacgattaatcaggtttttttaaggcaaagctcaaatagagatttactttttttttttttttttctttttgagatccaggctggagtgcagtggcatgatcttgcctcactgcaacctctgccacctgggttcaagcgattctcctgcctcagcctcccaagcagctgggactacaggcgcgtgccaccacgcctcactaatttttgtatttttaatagatacagggcttcaccataatggccaggctggtctcgaactcctgacctcatgatccacccacctcagcctcccaaagaagtgctgggattacttgcgtgagccaccacccccagcctagagatttacttattaagggaaaacatagttcccccaatttaatattttttatcagtgtattaagtacataagtcttgacatatgcttttgttctcattccttctcgatttctcatgatacttgcccctctaattttgtgccctaactccataatgattttaacatccttttgtatttatgtttctgccaaaggaagttaacctttcttcttgggtgctttatatatgctacctctttaagcctcattaaccttaagttctccatatggcaaagctaagattcaaatccaaatccccttgccatcatagaatattactttaaaaattttttttctttttaaaatacctctattttctactgctgcttgttctggtaggatattactttttaaatttgtttttcttttaaaaatacctctattttctactgctgcttgttctggttctgtctctcttcctttgacactcaaatttcagatgtgacccatttgtttggtgtcttccatttctttgatacctgtttgtacctgtcgtatgcccccgactattctcttgaaactgccttctccaagttaccaaagtcctgctaatttccaaaatcctggatttgccaagtttttctttatattcccacattgttgatgttacaggtagcagtggaggtaacagaaaagggaagtcctcagtgttacactggcatatgtttaccaaccaaccctgcagagggaaaaaatctaaacttatagcttttgttaatgttcttagtgtaaatattccgatcgtacatcattttaacctaccattgtggtgtcactggagttgtggaacatggagttgggaggatatccagggagcttgtgtgagctggctccagcaagccaatgcatgtcctttttgggatgttattatacttcttggcttttgcaagatgaagcatgtgattcactttctttttctttgactccagcttctccccatccttttattgcgtctatttctctcttgtatccactaataattgacttagttgagaattaaattttgcatcccttttttctcttccttggtgttttcttctgctctcatgtgttttgccatccctgtagcacaagtgatgctaaacccttgtctgtcctctcaaggtcatctcctcattccaactgtaattttttatcagataccctcccttttgcttgatattcagtagggctgaaaataggctctttagcttgcccctgccaaaaaaataagtactttcttctctatcctattaagaagtataaatgcaaactatatgccagatacatcatgaggtattttgaacacaaaatttgggaatgattatccatattttatagattaaaaaaattccaagctgaaataacttgattagtttatcaaattaacctatcaaataggcaacagaactcagatgtagacacaggactctgccacccaaacctatctttctttccattatagcatcagtgaatacaacaatcattttttctcacactgatttaaaatatgcaagtaatttttgagtttttctgtaattatcacatcctatttcatcccctgtgccagtgtttgtgcaggtgtctatctccttcctacgctataagcttctaaaagcaagagtcatgcaatattcatcattttcttactgtaacaaaatttattgtagtggaagataataaaccttgatttgataagcaaaatagttaatgaacaatgataatgttgaatattttcattgtatttatgctataaaagtgtttctctatcatctttgttgagagctaccaatgattttgtacacagaagatgaatttttgcaccaaaggaatattcaggtttaatttgctgcaatgaggaagaaaaatggaatacagagtatgctcatattttagtgtaaatcgtaaagtttaccaacgccctattgttttcagcccaatgctcttttacccatttctagccagattacagcttacactccagggagtctcaaatcggtttagggcaatattcccccttgcatttcagacaaattcaggggactcttgggaagtctttacaccttcaaaaatcttaattagggcctaggactcagtattgtacccaaatttctctgatttgcaagagctatcgacactactctgttgttagtacaaattgccaaatgtagggctgggcgtggtggctcatgcctgtaatcccagcactttgcgagtccgaggcgggcggatcatgaggtcaggagatcaagaccatcctggccaaggtggtgaaaccctgtctctactaaaaatacaaaaaaattagctgggcgtggtggcgcgtgcctgtaattccagctacttgggaggctgaggcaggagaattgcttgaaccagggagtgggaggttgcagtgagctgaaatcacaccactgcactccagcctgggcgacagagccagactccgtctccaaaacaaaacaaagcaaagcaacaacaacaacaacaaattgccaaatgtgaggacgttatgtggtgctctgcgtaagtgcatgagtagatgtgtcgtcggacctttcctgaatctgtagtttctattttttgcatcacctgtggtatttcctgccctcaacagcatggagaagctgcttcttgactgagtgtgcctaagggctcctctacacatagcaattcacagtcctgccgcaagataggccatagatacagagcttttcttcccatgaaagtaggtggggccatattggctgcttttgactgtaaaagtatttgaatctgtagtgtagtggacaaccccaaaattacccttttataattcttgagatgtctgttttctgcgatgctttacactaatctactatgccatcccctttttacagaaatgttttaagttgctgtttatcataaaatatcttcaaatacatcatttatcagactcaatcactagcagacttagaacagtcttagaagcctttagctataaacaccattattttaaaaaatacgtgacaatttgaaccagttcgttgagcatcagggacttttaagtgaatagaaggtagtgtccacgtctcagagattttacagacagaatatacccactacagaataatctatttgtttagtgattctttgcaactgagcagcgacaaccaagattgagtctgacaaaaaaggttccattactatgtctcaactgatattccattgttgagaaactagtggcaattgtactttgagaagtttgatttcaatgtaaatcttcagaaatatagatgagcagatgcctcattcacattccatcagacatagaagataaaattattaatccggttggtgagggtaaaacttatatacaaaaatctgagatgatttttgttgctgcaccatatgctgatatggtataactttgataattgtcttttattctctaccttgcaaaattaagctttgtcgagagagatgaggaaatggctgttcatggcttcccaggaatgccagtttggacaaataacattaaattgtccttagagccttttatgtggattgaatcaaatacataatggaactccctatttaggtctttaattcttttaactttaaaattagactatatgaggatattggaggatggtgaaaattatatgccaaggctttagttcatgtgatattactgaactgtgatagaggttctactttaaaagggcagttctgcatgatatttagctcggagtctatgttcctacattttgcaagtgatagaatcacaaccaaattagttcagtgaaccccccaaaataagcaaataataaagtttatatttcaaatattccacttacaagtgcagggttcattttgttgtttccctagagaaaattcattttaaggtgctgtgtgtgtgacgtgtgtgtgtgtgtgcgtgtgtgtgtgtattctacaatttgtcttatttggtctgcctttgtctctattctccctctagcctggttgccttggttaccattacatgcatgcttgtatgtgaagtttctctttgacgtacatttatttctatggaaacaatgacatcattggtatgggtaggtgcttaggaaaagcaaaaagaagcagcactgagtattggtttttctttcgatgataaaatatatcatgaaataaatattttaaattagagaattatatttttgctttcatcttgacttgatcaagaagctagatttttgcttgtttatagacttgctcgagtaaaataatttaaaatgttaaatatactatttctctcctgatacattatttggtgtcataaaactcaccacagataggtataataataataattaactctaaaagtctctcaaatagtaaaaagcctatctcaataacatttgttaccatcaaaaaattgtgcaaggaattttatattcacatgaaagcaacagcaatgtatagatgatggatcaagggaaaaaaggccctatttgtagttattatttttaaaatctctagttttaaaaacacagggatataacaggaagctgatagttattaaaccatattttctatgacatcaaataagtccatgtgtaattggtattccgttttatcttaaatcttaagaggctttttacatcttttttttaaaaacgattttcctctcctttctacttccacactactccaatctattttttttctttatagatgatgtggaaacctgcctatgattttctgtatacctggagtgctcactatggaaataactacagagatgtgttacaagaccttcagtcagctttggacagaatgaaaaaccctgtgactaaacactggagagaattaactggagttttaatactagtaaattctttggaggttttgagagtaactgcattctccacttctgaggaagtatagaaacaaagcgtgtgtttttgatgggagggaaaatgaggtaatggtgtgtgtgtgtgtgtgtctgtgtgtgtctgtgtgtgtctctgtgtgtctgtgtgtgtgtgtctgtgtgtgtgtgtctgtgtgtgtgtgtgtgtgtgtgtaggaaagaaagaatctcagaaaagcattatattaattttcttcatgctcaaaaccagtttttttttcctgatgaaagcacagcctaactgataaccaagatgggttttatcctcaaatatgtatttttgtgtatgtttcaaatacaagtattaggctgctttgttcttagaaaggaaagaaaaaagaaaagtgccctctctctctttcagtgttattttaaatttactaagtcaaagctgtttgaataattacatcacacagatatctgggtaaactagagactatcaacatgatcaaggcagtgttcccaggaggcagctagaaagaggggaagcaagcacacaccctgtggccagtcacggctgcccgctttccacacctgacctcttcagttcatcagtggggttcaccagcatcacccccatttttcatggggagaaactcagaagtggagagaacgtctgaggctacatagccagtacaaagtaggttttctgcttgaaaaacctgtttctatttctttttaaaaaatcatactgcataacagaatagtaaaaacaaaatgcgtgttaagacttacagggaaacagttgccgtttcattttaagtgagacttgctactctttttcatcgtctcttgaaagactgacagaaggaaaatatgacttatcagaaatctgttgtctgcatgcatggacctagtgttttcatcagctcccttcagcatcttgggacctctctaatcctgcctaatttgggactttttctgcaggattgtaatgtaaaatagttctttagctcttggagatttttaataatacgagttattaaaaaccaccaccaccagaaacttgattaacttgattaccctgttgagtagagaggtcttaaccaccgaaaacactgatatctttatgttggcatgctcatgcaaacacatgtgtgtgtgtgtgtgtgtgtgtgtgtgtgtgtgtgtaccacagtgttttataaagcacagcctaattgattatataggacaaaaattgtataggaccctgggtcagtataaatgctaatggctgacaaagttcacaaagagatgtattttgcttactcctctgttcaatcctctggttgcctgccagtgtttatgtgtgtatttggacagacattcatttattgtcattcagtcaataggtagagtatatgtgtctattttttggcaggcatatagatgcttgaggctaatgggaaaaaaccagcatgaactctgactttagtagtgctaagtaatagataattttaaaaaatgacaccgttaaatagaaaatggcatgcatactaacagttgcaatggagaggctgtgatgctacgagatataaacgtagagatgccatcatgtgaaactggaagtgggggtgggtcagggaaatttgttcttggaaagaaataatgaacctcaaggaagagtaggcattgtcctggtgtggtggggtgtaagcggtgatcccacaaagcactgaagctcttagatgggtgggagctgaataggtgcagatagcaggggtgaaggagtgaaaggataaaagattcaaggttgagatgaggatggagcaagaagaagccacattagggccattaaggctgctagaatttagaaagaaaacacacagcctcaaagaaatgtgggtaagccaaagaaggattttgttttgggaacctgaataaaagatgtccatttggctaaaaagtaaaagcagaatctttttagggcttttaatatacccaccctgggatatttggtatgctggcaatggtaattcaaattggcgtttaagaataatcttggccgggcgcgatggctcatgcctgaaatcccagcactttgggaggccgaggcgggcagatcactaggtcaggagatcgagaccatcctggctaacgcggtgaaaccccgtctctactaaaaatacaaaaaattagccgggcgtggtggcaggcgcctgtagtcccagctactcaggaggctgaggcaggagaatggcgtgaacccgggaggcggagcttgcagtgagccgagttcatgccactgcactccagcctgggtgacaggctgtctcaaaaaaaaaaaaaggaataatctgtacggctttcagtatttatatttgattataagggaacacagcctgaccaaataattatgtatacacattcaaggacagaatttattttaattaaaaataaattatgagagaaggaaaaaaaagcacagtttttactttcagaacacagtccttttttgtggtgattttgctttctttagaacattcttggaatcttattaacatgtcagctaaccagagaattttgggaagggatagtggggattaataactgggtttttccaggctccaagatctaagaagacagagatcttgttagctgattagtgtagtaagattaaataaataatttaaggtttacattgcatcatgtattatgattgtgattgagaataataagagtttaaaaaaatgaaaaacaagatctctgtaatttgaggatgaaacaatggttctaatattaatacacacaaatatattttataatcttgtaacaaatccttccaggggaaattttttttttttttttttttttttttttttgagccagagtctggctctgttgcccagactggagtgcggtgtttcaatcttgactcactgcaacctccacctcctgggttcaaaagatccttctgcctccgcctcccaagtagctgggattacaggcatgcaccaccttgtccgggtaatttttgtatttttagtggagacaaggttttaccattttggccagactggtctggaactcctgacctcaggtcatccacctgcctcggcctcccagagtgctaggattacaggcatgagccactgctcccagccttccagaggaattttaagcccatgtccaaacattctgtttgtataaatatattctaatttttaaataaatagtttctacttttctgaactttatattttttcttgctataatggattttcataatcagaaaagattaaattagtaatcatgaattgccttcaatatttggcagtaagtcaatgaaataataaggcacttatataccatctttgacatcattaaaagtatcaaatcccattaatctaaaacttctttaagcattttgaaagcagaaaatgtttacatggttctttcagttcctcaggctttttgtctaatgatgcgtgacttaggataagatttgaattaagtgcccagcttgaaacataataatttttctgtataagccacagatcctctacctcctttgtgttaaagcctttatatgaaacaattaagtagaagcattcaatagtgtgtcattaactgttcatactaataaatggatacagcacattttcatggcctgtaatgtagaacatactatataaagttctcagtttggggatgactaggtttctggaaggaatagaatgctaaatcaatggatggcattgggctgagaaacactgctgctactaatcagccttgaatgtgtaatgtgaacatgcaaaagagaacatgcatacactcaaatttgtacaatgctataactggaagttgaaggacttgaatttttatattgtgctattgttatgttttctgtaattgtttatatctaaggaatttttgaggtaatataaaagaaaaagagaataatgaacaatgatgtcactggagggtttttacattaaattagatcatttttcttcttattcacaataataatcttaatctttaagaattaattataatttaatattataattcataatctttaagaattaataattataatttaatattataattaataatctttaagaattaataatataatttaatattataattaataatctttaagaattaataattacaattaataattaataataatcttaatctttaagaattaataataatccttaatcgcaataataatcgcaaggaggagaagtaagtccctcctccttctgtatgaacttttctcccacatgctgctgtatggtttagtgagagtgaagttctaaagaacatcaatatgattggtgggataatccaaagacattttttcagaatcaaatggcatgtcgaaggtttgtttcttgcatatgtatttactggtccacagcacaaaataaagtgaccacatatacataggaaagttgaatttgtacacatacagcatctgaaatgtatctgatgttcagcatcaagatttcactgaacattgtagaaatgtgtatcttttgcatgtatattttacattgattttctatttatgtacatctagaaagttttaaccctaataaatagttttgtaattttgaa

SEQ ID NO: 340 - DNA, 9012 bp, Homo sapiens
agagcgagactccttctcaaaagaaaaaaaaaaaaaagaggcactgggctgtaggagagtggtgaaatttctggaccaagacaaggcggccacaaccctcctggggcaacaaccctcccgccgggctggttttttggaacctctgcaaacactttctcctgggtcagtttcccgccaaaccgggatggaggatgtccagaggtcccgggagtggaagccgctgtccctgtgtctactgggaagtgggcgaggcgggatgctgctggccaggctgctcggggcgaggacccgagaacacgcacttgctcgctgggcctcggaggggtgggaggggcggggcggtgcgcagcctccccgggacaggtctgcggtccgggaccaactaggctgcacaggcacgctgggcgcatgtccgcctcgccggggctgccaggtgagccgcgcgtgatcggggagcggggcccaccggccggagggagcgggtataggggaccctgccctgacccggagggagacgggaggtgcccgaggagcaggggaaagagcacccccgcacgtccctgcagcaggcagggtcggacggagcagcgcccccttcttctctggaggcagcaggagcaccccagatcctgtggcgggaggcgaagtttcattttagggaacaaaaagcccagggcgagaagacatttgacttggagagaactgggggagttagggatctctgatttcatctcacactttttttcacacccaagtgaggggtctgggaggtgggcagggagagtgcttaggagacaaacagagttaatccctcaccccattgatcaccgccctgctgaatgttctcaaagctcaccctgcatcgtggtggactgtgtggtgttggaaacgaccaaagactctgccccacccccacccccaacaagcgaggaaaatgtttcccctgaaatgtctttcttctctgtcttgttttttgtttcgttgctatggattcgtgaactagcttgtaatggtctctaaacctctaacttgtatgtataatatttgcgtgtccatgcatgcatttttctgaagcgagctctcagaagttgtatttgtttctcccgaagaataaataggcaaaaccatatctttgggctgcatcaacatgacctcttaatagtcttcagggaaactgagttgcagattcttatttaacgaattggggattggccgggtgtgtggctcacgtctgtaatcccagcactttgggaggctgaggcaggtggatcacctgaggtcagtagttcgagaccagcctggccaacaggctggtgaaaccctgtctctatacaaatacaaaaaattagccagacgtggtggaacgggcctgtaatcccagccactccgaggctgaggcaggaggatcccttgaacccaggaggtggaggttgaagtgcgccaagatcatggccactgcactccagtctgggcgacagagcaagatttcgtctccaaaacaacaacaacaataataacacaaacaaacaaaaaacaataaagtggggattgagggaagagccttgaggctcccagaagggttggggagaaagattccttcagggaccagggaggacagcacttacccagtcacaaatttacctgttttaagaattggtctcttttccaccagtatgaagtacaattagttttcaaatatgtagactgggaaatcgaagtaagtctttgtgaatgaaaggtctacttaagtttctttttgacaacccaaagtgaccccagctttggagcttccaaggactctggagagaaggtaacagattaagtgttccaactgtgcacctccctcgtccattggcatcttgggaaaaggaggaaagaaccaactgtgacctcagcatgggagcagaaccagaaaaacccagggagtctgggggagagggaggagagcagggagaggtacaggcattgttggataatgagcttaacttatccaacaaagctgatctgcaaaaccaacaggcaccttaggaaaatcacatttcatcattaatcccactttctttgttcccaaataggcaagagtactctgtggaggtgaagtagtatctgctgccacttaactggatagcatttctgatcctgccttctttacccacagaatcttggaatcccaatccgtgaggttcctgggtgtgctggcatcaggacagcggtccacgaacggtgtgttacccaaatattgacatcctgcagctagcctcaaacaatcacagctactttccaatttcagagaaaaaaaggctaaaattgtaagctttttcttaacaatttttttatttcttaatttttgtggatacatagcaggtatatataattatggggtacatgagatattttgatacaggcatgcaatgtgaaataagcacatcatagagaatggggtatccatccactcgagcatgcatcctttgtgttattaatacaaacaatccacttaccttctttatttaaaaatgtgcaattaagttattatgactatggtcaccccattgtgccatcaaatagtaggtcttattcattctttctacctttctttttttttttgtacacattagccatcccctccaccagtcccccactactcttcccagcttctggtaaccatccttctactctctatgcccatgagttcagttgttttgatttttagatcccatgaatgagtgagaacatgcaatgtttgtctttccatgcctggcttttttcacttcccataatgacctccagttctacccatgaggttgcaaatgacaggatctcattcttttttatggctgaatagtactccaccatgtataagtaccacattttctttatccattcatctgtggatggacacttaggttgcttccaaatcttggctactgtgaacagggctgcaacaaacatgggaatgcggatagctctttgatatactgatttcctttcttttgggtatatactcagcagtggaaatgctggatcatatggtagctcagtttttagtttgctgaggaacctccaaactgttctccatagtgattgtactaaaattataagctttttcttcacaagtttattccaacctttgatgctggcttttattcatgctgaacctagcttagttcacacttatatttttggttatgttaaagctgaatacatcattatttcttgcttgcaaagaacccattggtttcaagtgatttgtaacctcctcacgtttgagaactactgttgtagaaagagaagggaatatacccagggttgtgccacatttgtctttaatgtcctttgagttgaaatgatttgtttgtggaccatctggtgttctgagttgtggcagtgaattgcactgggccctgaagctagggaggaaagaaacagcttcatcctacctgctcacagcccagaccggttttttgtgtgctgttgttaacatcacacgtattttgtaaactcatacttttatgaggttttatggaacacagattaagcttcctagtcaacccctccacccttacaattggctagtcagtcttcattcaatctgaattgaactattgtttttcagaacaataaggcagttgtttctacctataacccatcttttcttcatagaattattgtttaaaatggtctccataacatggctaagggtttatttggcaatgacaggaattgtaattttgcttcctactttaaaagtcatgaaagatctaagcttgcttttttttttttttttgaaagagtcttgctgtgtcactcaggctgtagtacagtggctcaatctcggcttactgcagcctacacctcccaggttcaagcgattctcgtgcctcagcctcccaagtagctgggactataggcatgggccaccacacccagctacgtttttttttgtatttttaatagagacggagttttgcaatgctggccaggcaggtctcgaactcctgaccttgggcgatccgcctgcctcagcctcccaaagtgctgaggttacaggcttgagccactgtgcctggcctaagaaccaagcttttttttagaatgatagttgccccttcagtagcccttcagtaccatataagttttgctgatgttactggttgttctttaatgcattcagcaaatattaatatttactgcacaccttccatgtgccagcccctggggtatgaggtgacttgtgtttttctttcaaggagctgacaaataagcagcttggacttgaattccctccccttctcttcctctcacgtctctgttgaggcaaatcccaattggaatgaaataactctggagaattattttgggcgttactaaaactatctttacttctttgctccagaagcaacattagctacttagtggcctcttgacataatctaagaactgtctttgggacgtgctgcttctgggactccttggctgtgaccattttctttcaagtttaagtgacttcctgctccttatgcatgagtccatttaagacattctgccaagggagaagccatccactgtggttgcctggcttcagagcactctcactggtcagcagtccctgactcctatgacctccagtgctgtgtagatgatagtttcatgaatagcacttttaacatctatgttgcattaggtattataagtaatctagagatgatttacaggaggatgggcataggttaagtgtaaataccataccattttatttttatatcagtgacgtgagcatctgcagattttggtatccttgggggtctgggaaccaatgcactgcagatactaagggacaactctacagtgtttgatttattgagctttctgagatattcagccttttcctgtcttcacacttgtttttccctctattatttagggtaatcctgatgaaaatcaacaaaatacacatgaagagacagcactgagaggtaatgtgctaactggtctttgtgattacaggcacttcagatttccctcttgcctactcattgtgagatgcagcccagccctgcaacaagactgccacagtcgtatcctggctcacccctaactagcggtttgactttgagcacatcactgcctcctccgtgcctcagtttcctcttctgttgaatggggatgatcacagcactacctcaccatttgttgtgaggattaaatagattcaaatatgtaagacacttacagtaatgctttgtacacagaaggcactattattttttattaatccctatttttccttcccaacttcatctcccaatatcccataaccatgctgatttccttacaactcccccagacctcctggactaagtgagatttggaagagtatactcagggcagtcaagaaggactgattctgctaatttaggatttgtcaagttgggttagtttgaaatatacctctgtactcctctcaggaaatgctggatagtgtagatttagtatcagataatagtaataatggtggcagactctgatgtttcctccttcccttgtgatctcagtagtcttgtaccattcatacatcaaatgacttagcaactaacaatcacgtaatattttttaagcttttcttatgtgcccagtagtgagccaagagttttttttcctatttttaacatactattgacagctccatgaggtgggtttatattttgttaaaataatttgccatgtccacttccccagtagactgtgacagtggcatatacatctgtgtgtgttattcagtttgtatctctaggacttgacagaggacccaatacagagtgggtgctccagaaatgtggacttggatgcatttcaccaacagctatttacatccaaataataagctaattataactcttcttctagatgtacttttctcattgcaaaaattcaccgtcaaaatttttaaaaacactaataagcaagaagaaggaagttaaaattgcactccttccagccctagagagcttaatcaacttgcttaggaacacgctactaaatggctaatctgagcaccaaaatctggccatctggcttcagggctcagcctcctaatggccgcattataccattgatcccgccccatccaccccaacacacacactcccctgcacaaacaaattatgttagctattaaaaggaattggaagagtggaaatgtgcaattaaatctaccacaaatacaatgttgcaatacgtgcaatctatatttttaaaatttacagtattcagcattttcctgtcttcacacttgttccctccgttatttacggcaatcatgacgaaaatcaacaaaatacagattgagaggcagcactgagaggtaatgtagaaagggaatggcttttgagtcagaaaaatgcgagtgtggatcccagctaagcccctagatgtgttaccagagacgagccgcaaaacatttctcagtcttagtctcttgtaaaatagaggtaataagaaacacttttcagtattttgtgacatgtagaagtaagtgatggtggcatgcatcacacttggttaatagtaggtcctgttgttaagtctctaatggcgataccctatggcttctccaaatggtgaccttgccaaattgttttccaaagcgacatgtggcttttttctcccaatccctcattttaactctcatggtaatttaacttttatatttttattagatgcatttagtaacttgcctcatagtcattttcttggaaattcaatttcttctccacagggtctcttttgagattaaagagagagaagtggcaaatttaggatgttagaataattttcatttaaaagtagatccttgtttttattaccctatcattaatgttttctgttttcctttatcagcgagttactgctcatttgattcatattgccaaactgaactctcttgttttcttgcaagatgaaaggagacaaccatgaatgagccactagactatttagcaaatgcttctgatttccccgattatgcagctgcttttggaaattgcactgatgaaaacatcccactcaagatgcactacctccctgttatttatggcattatcttcctcgtgggatttccaggcaatgcagtagtgatatccacttacattttcaaaatgagaccttggaagagcagcaccatcattatgctgaacctggcctgcacagatctgctgtatctgaccagcctccccttcctgattcactactatgccagtggcgaaaactggatctttggagatttcatgtgtaagtttatccgcttcagcttccatttcaacctgtatagcagcatcctcttcctcacctgtttcagcatcttccgctactgtgtgatcattcacccaatgagctgcttttccattcacaaaactcgatgtgcagttgtagcctgtgctgtggtgtggatcatttcactggtagctgtcattccgatgaccttcttgatcacatcaaccaacaggaccaacagatcagcctgtctcgacctcaccagttcggatgaactcaatactattaagtggtacaacctgattttgactgcaactactttctgcctccccttggtgatagtgacactttgctataccacgattatccacactctgacccatggactgcaaactgacagctgccttaagcagaaagcacgaaggctaaccattctgctactccttgcattttacgtatgttttttacccttccatatcttgagggtcattcggatcgaatctcgcctgctttcaatcagttgttccattgagaatcagatccatgaagcttacatcgtttctagaccattagctgctctgaacacctttggtaacctgttactatatgtggtggtcagcgacaactttcagcaggctgtctgctcaacagtgagatgcaaagtaagcgggaaccttgagcaagcaaagaaaattagttactcaaacaacccttgaaatatttcatttacttaaccaaaaacaaatacttgctgatactttacctagcatcctaagatgttcaggatgtctccctcaatggaactcctggtaaatactgtgtattcaagtaatcatgtgccaaagccagggcagagcttctagttctttgcaatccctttattgagctcctccactggggagatataagaatgggatgcatgtatatcagcaaagtattcagacatagtattacaagctattggaactcagaggcatcttagagaacatctgttcccaccaacttactatatatacacggaaaccaatttcttacccttgccctagattgctcagtaaatttgtgccaagataggagaaaaccaatcttttcactcatcatttcatgcttctctgcactctgggcctatttgtattgaaccattagacaattcaaaccactacttgtatctttcttaatatttattttttacatctcagagctctacaatttgtttccttcaagcttaactttgagattataaaactgggtttagccagttctgtatattacttcaagccagtaagatacccttgaaataatccaaggacgtccatgcaaatagttgaaattagtacctgcaatatatttggagtattatgtctttattgttgttaaaaagtttttattgaatgtatgaaaattatcaaattgtattcatcattattaacatgtcctggggaaggaagggaaactttctaggacagaagtcactttcagatgtcatgtatgtattgggtgttcaatcatatctaacactgttttgatttttgtgggaaaatattccaggaaacgctaattctctttagactccttgttcttttatgactacaatgaacatatgtctatgtgatagctaaagatatttttgaattgtatgtgtgcttaattatcggtaagtataaatatttgagaaaacacatggtctggatatttaaaaccctcataaacatgttggtacagttaataaacttatttataatt

SEQ ID NO: 341 - DNA, 243023 bp, Homo sapiens
gtgccagctcaatggggccgccgacctcgaagtttccgaaggtaagcgcgggctgcagggcgcccggccccgccgctccggagccgcctcgcgcccaccccgcctcacccccagccccgcaggacctcaccctgcccggggacgcggccctcgggtgcgggactcccgcgactggaggagagggcgcgtcttcgcgggccagaagcgagactcagagagcccgggcaccgaccccggggcggtcctggggcagggctggctctgctagggtccgaagtgccggggtccctccggagcgcgtgctctcggggtcttgagggaacccgacagaaccggcttggaaccctgcctccagcacttgctcgccgcgcgagccagggcagatcgctccaccggtgtcagccacagcgtctcggccgagaaccggcgcgctcgagccccccctcgctgcccggctgaaggtgcgggcgcggggtccggctcggagtccggggtaagacccaatgcggcggagttcagtcccggccgcgggtaccatccagcagcgtctacgcgctcctcccgctgcccgcgccggtgggtgctgagtcaggcccggctgctgctctggtttggagaagccttttttttttttttttggctggcagggacagtccatgacagtggcgcgcccagagcccgaagagcgttggtgggatggacagctgctctcgcaccctgggaagtgacccgggttggcttttatgcggagggtcccagggacagggaccacacactctgtggcccgagacgctgccccgcctggattgaatcctagcttcgccctgaccggccgggtggccttcagcaagtggcttactctctcagggcctcagtttctcttctgtgaaatggggatgacgttgcttagcgggcaaggttgtggcagagataaaagaagaggcctatggggggtactggtgagggcccaggaatctgtttttgctttcttccctcctcccttcaggggcccagtgaggtgggtgatggaaggtacagagggctggtggaccggggtagggtgctggtctctgtcactttatataacaaacacactgttccaagagctttcaaatatccaacccccccccccgactccgttgaatcctccccacattatccccattataggataaggaaactgaggtgcagagaagttaagtaacttgcccgaggccacacagctgccagtgggagagctccagaggctgtggcgagtcctctttggcatgtgctcacactgtcacgggaagacatcacagggacactgtcagcaacatggaggggacgggctgtggcagggagtggggcccgttgcccacaggtgagctcctctgtcagctgtcagtgccccacaatctgctgcagctgcctcctcagtctcattgtcccccgcactctgaccacgccctggtcgcctgctcatgctcagctccctccaggcccctgaatgtgtctgtttcctacctccctgctgtggagtgagggtttccgcccacctgggatgccttctctgtcccaggtgtcctcacccctgggaataccctcaccccttgagggcagggactatatccggtcatgtctgcaggacactgactgtgcttggcaaatcgcagcttctcagtgtggaattgttgactgtcgattagtgagtgcgtgagtgagtgaatgccacatggcctttctctgcttttcagaaaaggggtaggcaggctcgatgtagaaccttcttcagctctcttaggactccctagagcctgcttgcggctggcaatgggtcacggaagatctttgggctgggagtcagtccctgggttctaaacgccagtgtgtgtatgtatccatgtatgtatctgtgggtgtgtctgtgtatctgtgtgtgtatccaagtgtgtctgtgtagctctatgtctgtataggtgtgtctgtgtgtgtgtttgtgtctctctccgtgtgtgtagccattaagctctttttggaataaaaaaattgcaaaatgaatgcatgatcaccagcatcttggaaaaacatgaaacaatatggaaatagttggagtaaaaggtgcaagtcctcccctccccctccccccacctccttccgacccaggaccagctacataatttgtggggctcagtgcaaaatgaaaatgcagggccctgtgttcaaaaagtaggggaaagtgtggttaaaagtgctcactttctcctgcactctctctccgcctgtcatggtggttttatttcctgtgtaacatcgtgttcctttgggcatggggatgcttgcagggtgagtgcagactcttgcaagacgcctgtcttctggccagggacagggaagttgagtgtcgagtcaggcatttccccttcccacaggtccacaggtcgatgccccaatccatggcagacaggtaccccacagggcattgcagccttggggttgagacagttggtacctgatgttcctgctgaactgcccaccgaacacacagtggcactgccagcccagggaagggcggtcaccgccatgatccaccccaggatgcactggggtgcatacactcctagacccagacccctgccaggggaggagggcagcagtgacactgagacaaggcacaaagaggaggaagggtggggtccagggtgccagaggccaggggagcagtcagctgagaacccaggttggggaggtggcaggaggcaggagcacacgctccatgctcacagcacaggctctgctgttccatcagacattgcttaggaaacacacattcaaagattcagctgtcaggaattttatgactctgcagagccttaaaccccaagcacgagccccttccaagcatgaggcctgtgtggctgcctgggtcacacacttgtgaagcgggtgcagctccaaccccatggctgtggataggcacagagctccagtaacagcagccaacactgagaggtgctttgtaggatccagggacgcttccagtgcttcctaggtatgagctgctttccttccgccacaacctggtgaaatgggtgctcttgttggctccgttttactgaggcacagagagattaagtgatctgcctgaggtcccacagctgttagtggcggagagcctttcagtcctcccccaaggcttgtccttggtcactctaccccaccacctctcaacaagggcctggagctcactgctgctgtcagaaaaaaagcaaatcttatttttttcatttgccagtatggaaacgcccctggcttggagttgcttccagaagaacatagaagttccagcccttagtctggtagccaagagcctgggtgggctgggcctggggggctgtgcactgtcccctgcttgccctcctccaggagggtcttgcatgggtcttgcatggggctgctccctgccctggggcacccctgcccctgccttgcctggctaacgcctgcatagccttcaagggccccaggatgcctcttccttggtgggcttcccctgtggttcccccaacaccttaagggacatgtcaattttgacgtggaatccccagggtttgagttgccccttggggtcacacaccacatgtttgaggagtgaatggatgaaatggcctgaaatctgattagcacatggaacacagttcaggaagggagctgtcttagtccgttggggctgccgtaacaaaacaccatatagcctgggcagcttatgaacaacacaggtttatttctcaccgttctggaggctggaagtccaagatcaaggcgtggcggattcagtgtctggtgaggacctgcgttctggttcacggatggtgccttcttgcagtaccctctcagggtggaaggggcaaatgagctcccttgagtctattttagaagggcactaatttccttctaattgtttccccagggcccggctcctcatatctcacattgggggttaggatttcaacataggaattcagggggacacaagcatccagtccacagcaggggggattttggaggaagttatgcatggggcaagaattgggttaaggtgttgggagtgtagttggcacagtgatcacagatgctgcgtgttgcaaatttgcagccctgggtgaagtttaatctctttgcctctgttctgtgtgtgtgtgtgtgtgtgtgtgtgtgtgtgtgtgctgtgtattttttcagaactgccatttattgggcacttctgtgagcctggcactgcacgggcactatgcactatacactctatctcacttatcctcaagtcaacttgtgagggtgtggacgtgcccactgcccccggttttacagaggagcacactgaggtgccagtgatgtgctccaggctgcttagcagtgagagatggatctgaacctagttcttcctgccttggctggactgcgagctgctctcccagtgtttaaatttaggttctgttctgtgattccttctcaggaaactgctattgtcagggctgcctgctcatcagagcccctgtctcagcgcagtgttcccctggcattgcagagccacagagctgggagccactgttgctgtctttcctgtgcactcctggctggaggctggtgtcccatcagagccgcagggctgggtggtgaattcccaggatgggcacctgtgagggtgcaaggtcagaaaaaaagatgacgctgggctttgggggctgtgatggagactcactgggtggggcatctttagatgggaggccaggcagggagacactgtggaaatcctttcctgggtctggagtggaccggttgcccaggtcttcattccaagcttggctcggtgcagggctccatgttgagtggggtgtggcttcatggtggggacactgttgcactctttgctggcactcctggtcagaggatggtgtccatcagagcctcttccattgtgtagttcctggctgccaaagaatctttctgcggcaagaatctgaaatccaacctagtttgacccaagcacagagttgatcaggctgagtattgggaagttcaggggatgccctgatattttaggaggctgagcacaggtggccttctccttgttaggaggcagccagaggtggcaggtaaaggctcacacacctgcaggtcccaggaggagagaagagggctctttgtaagccctgagaaaggcttctccttgaccttgcatgggtggccttcccactgcaggtacaatttccctgtccccatggatggctctcccaagcaaggggatggggccccttaagtgacagccccaccagcaccccaggtcacagatggcagctgagagtagtgttaatcttcttagctggcacttatggagaacttgctgcatgcttggcacaggcagagcctgttaggtgtatcaggcgctcactcggtgttgggatgcgatcatcacagccactttgcaggtgatgctgtgacatgtggtgaggttgggagaagtcactgccccaagtctcaccgccaggggctgtcctgctgggctcgggcacctttaagaggatgggtgctgaggctgctcagaagcacctggccgcctccttcctcctgccttcctgtccacaggggaggaggagaggtctggggtggggctggggagggtttgcctggagtcacgcagcaggtgagagtagaaccagggcctgtgggatgcacctcactccaggccagcgtccgttgtgcccgcccatgtcatctgggtctccagtgcccaggtggggaatattctgcagtagctcaccctcagatctgcctcctctccttcttcatctctactaccccaggtcaagccattgtctcctcttctggactacttgagggcctcccaatccagactcccctttcaactccctaaaataaccatgctgacctctgctgtgcccatctccacagcgctcactacacagcagcctttttcccgaccttggtacatcctgggctctctcctgtcccgggccctttgcccctgctattccctctgctcctggtgctaacccagcactcactctaactcatccttcaggtcgcagcttccatgtcctctctccagagaccttccttgcctcccagctaaatacgtcccacccagggagtctccatcactgtactccgggtccaacgtcatcatcttttcttttctttctttctttcttttttttttgctgaccttgcacccagcatctcctgactataagatctgtaagaactcatctgtgttctcggagcctggctcatagttcctgttgttgtagatgttgttgtcctaatgcatcaggtgtgtttggataacaccaatgagtggttcaaatattcttcccagattctaatgtcagtgctgcaggaccacaatacagtgaatttaaagtgactatttctactctttctcaggaaaggaacctattagcaagtacagtgtagttaaaaatgacctccttgaaggctggtaccttgaatcctcctcggtatcttctaaggaggcttgtaccccttgttcctttccagccccagcttctctctgccctggtctgtgcctggaacctgatcctgtcaaatttaccacctggatctctgccggggagtctttgggtgggttttgcccacaggaggcattgccaggagctgggagggcaggtggagagagaagtagggttgccgcctccttcccccttccctcctttggaggagggtgcagtggctgcatccttctgtgataataaccaactcaggggcaccccgagagatgcttgcagattctcccaggaggcaaaacttcagggggagaatctggttgctcatgttgctggggaggaaccacagcctggagtagggatctacactaatgcatgggttggcaagctgggcagggctctggaaagaacaaggttgcaggatgatgacaaggtggcctggggaagaggtgtgtggatggacctctcaaatgactgcagagcatgaggtatttgtgccctgtagtagtcagggttcttcagagaaacagggccaataggatcactgcacgtgtgcgcacacacacgcacacggaattggctcaggcagttatggagctgagaagtcccctgagctccatccggaagctggagaactagttgttctagtttgaaggtttgagaaccaggaaggctgatgttgcgatggtgtgagtgccaatcccagggcaggagaagactgatgtcccagctccagcagacagacagagagagtgaattctcccttctcctgcctttttgttccattcaggccctgaacaaactgggggaggcccatccacagtgggattacttagtctactgattcaaatgctcatctctactggaaacaccctcacagacacacctggaaatgatgtttagcatgatatctgggcatcccgtggccccgtcaagttgacacatggaatgaacccccacgtgccccatgcggatgctccccagaggcatccttcacgcaggaggctctcggtcacaggatagacacgctagcctgcctgtgggtgctgggcagactctttccagccaccccagggctcactcttgggctcacacacaaaatagggcagagatggggaaacacacaggcagaaaatatggccttcaactctccagggctgagctggccactgccacagctgaggtcccagtctccaacatcaggggacaacagtgactttgggtgtggcagcattacccgaggagaccagcaagcacccggggggcaggttggttcccttgttctcaggggggcggatgcataagccagatacagaatcgccttcccacccgcttctgtcagcagtgtcattgtggaattcctaattcacagtcaccgtcgcccacaagcatcacatcattcaaaggattcctgcggtggtgcagagctgcggcaaagggccctcgcccgtggggttcactctcatcacccagaagcagggagaagggcctgcggctgcaggcctggctgccacaccggcctccagacaacacacagcaggtggggccttgtcctgtatgccttagatcagcggctgactgttttgtgactgtcacctgcacagccacatacacaggtttgaggaccagtggatggagttaggaggagcccttcactggcttataatcactagggtgtcaaataatttatcatccaaagtggggtaccttagagaatgaaagggtgtgttatgaatgattgcacagggcagccccagacgtggccactgtgttagtgtgttggggctgtgtggtggtctgaatgttcccatctctccagtagtcctgtgctgaaatctacccaccaacagagtattgagggtggggctttgggaggtgattaggtcaagaggtcaagagggtggagcccttataaaagaggccgaggcagatatctaccatgtgaggacgcagtgagaaggcgccatccttgaagcacagagcccttgtcagacactgaatcgaatctgctggcatcttgatcttggacttctcagcctccagaattgtgagcaatttctttttcttttcttttctcttctcttctcttctcttttctttctttctctttctttctttctttctttctttctttctttctttccttccttccttccttccttccttccttccttccttccttcctttctttttctttttcttttttttttttttgagatggagtctcactctgtcacccaggctggagtgcagtggcatgatcttggctcactgcaatctctgcttcctgggttcaagcgattctcgtgcctcagcttcctcagtagctgggattacaggtgtgcaccaccaggcctggctgatttttgtatttttagtaaagacagggtttcaccatgctggccaggctggtcttgaactcctgacctcaagtactctgcctgccttggcctcccaaagtgctgggattgcaggtgtgagccactgtgcccggccagtgagcaatcaatttctgttattcataaactactcagtctaaggtatcttgttgtagccgtctacagactgaggctgccttaacaaagcactacacacagagtggcttgaagaaaggaaattgattgtctcatggttctggcagccagcagtctgggacgaagacgatagctgggtcagtttctatggaggaattagagggggaatctgtcctgtacccctctcccagcttattgtgatttgctgtccatctttggcattctttggcttgtagatggtgtcaccgtggtgtctgcctttctccctgtgcctgtctgtctctgtgtccaaatttcctctttgatgagggcacccgtcattttggattgggggtaaaccctactccagcatggcctcattttaactaatgacatctgcagtgaccctatttccaaataaggtcacatgctgaggtattgtgggtttggacttcaatgtgaattttttgtggggagagcacacagttcaacccatagcagtcaccccctgataaccccttgaactaattttgcttctagttcattaggcgtggtgtgtttgggggtcctggtgccccaagaaggaaggcttccatcagggagcagggccacagtctgtgaaagtggacactgggaccgaggccatttggactcctgctgctgctgggtggcctggtagagaagggggcactgggatgaggggtgactgctcctagctaccaaggataaatgaggtcacttcttggtggtatctggggcccagaggatccacggggatgcttcttagcactgacatctgataaaaaaggtctactgagcatggcagccctgaacatagagatgggagcatgacagacccagatcatgggtgaaaacttgggtcgttcccccaggtgaagaaccaggtgctctggcacaggcaaggtgcctatcggtgggtggaggaagaaggactcgctgctgattggccctttttcccctgccctcatctctcctggccaccttgaatgaaggctacctgtggtggacagtgtggtgctgtaggctcaaggcaggcatctgaagtggcgtctccctcaatgataccgttgctggtgggaccccgtgccttactgtgttgggctgagagtttcttcccggatagggggacgaggatgtttgctgagtggccacagtggactgcgctggatttctccacttgacccgtagatctatttttcacctctctgtccagtgtggtgccctggaggctgcatcacctgtggtccctgccctaaggctcccgtggagtttggccagtgggaggcaccagtcagagcttgcagggcaggagggagagggggaacactccccgttcttctccctgcggtggcgctgcaatcctagggtcggctgtgctctccatggtcacagcttgtgccagtggatcctgtctcatggtcccagttctcttcccctgcacctttcagcccagggagtaacagcctcctgtccttgcccttagtccctatgtgccccaaatgcttccttggtcacttcctgtaggtcacctctttgtttacttctcttctgttgaactatctggggtgaattctgcctccagtgagaccccaacatctatggaggccattggaactggggcatgtgtgtggccattcatcctgaaactggctcttgcctctgctactcacatgacatcaggcaatggccccaccttcctgagccttattgtcaaattaggacaataaagtccacttttgcaggatgtttgtgagtgtagtggaaagaataatgccccccaaagatgtccacattctaatccccagacctgtgaatttgttaccttacatggcaaaaggaagtttgcagatgagattaagttaaggctcttgagttggggaggttgacctggattatctgggtaggcccaatgtcatcacaggggtccttataagagggaggtaggagggtcagaatcagagaaggagatgggatgacacaagcagaggagagaaagaggaagagagggagaagagaagagagggagaaagaaagaggagagaaagaggaagagagggagagagatttgaagatgctgagctgatggttttgaagatggagggaggggtcatgagccaaggaatgcggacacctccagaagctcgaagatcaaggaaacggatcctcccctggggcctccagcaggaaccagccctgcccacaccttgactttagcccagtgaggctgatttcagacttctgacctccagaacagttagagaataagcttctgtttttctaagccactatggttgtggaaatgtgttacagcagccatagggaacttacacaatgagaacaaatgaaaaaattgcagggagactgcctgcatttcagagcaggtgccatggaaatgattactgcatttgggaacagtgggctcaggtctccccttgtggcaaaagtggacctgtaggctcagatgtgtagcacacacagcacctgctgtctttgctggtcctttgctgccacttgtctcatcttcactcacatcatcttttccttccacttccaaagtctctccactttctctccagttatctgtggcttcctaacaaatgatcccatgatgtgccagctgagaatggccatttcattgtgtttcatggttttaagagccaggagctgaggaagggctcagctgggtgattcttctgctgcatgttgcctacaccgaggtcgcttgttggtgttcagctggaggatggactgggctgggtggcccacagtggcttccctgtaatttatggtgccttggtggggacagcaggggctgagctcagctgggactgtcacctgagccctgacatgtggcttgtccagcatggcagcccagggtggtgggactccttccatggtgctcaagtttcctggtgcaatgtccagggaacaagatggcagttgtgtggcctttgatgcccagcttttggtgtcccagagcttcatttctgctaggctcttggttgagtgggtcacaggcccaccagactcaagaggaggaggcatagacctcatctcttgatggggggacttgtggccataccacaacactttacctctagttttattttctccttttccagctgggagtttcagttacttttctcccactggactcctattggctttgttctccatgccacgtgtttgttcattcattctacaaatatcacctgagcacccactgcaggctgtggtctgtgctggaaacccagagagcacattaggagcatgtgacatacatgagcactcgtgacttgccaggggctttctaagtgccttctgaggccaagtagcctccaatccccctggaaggcaggtatgtttcttatccccagcttacacatgtggatactgcagcacaaaaggggaagaggctcacctgtggctgctgagctaacctgtgggagagtgggctttgagctcgggcaacctaactggagaggcttgtgcataaccaccaggctccatggccccggaggcgaggaaggtatggcaattgacctccaggaggactctctttctagagagagaccaaaacaaaagtgttgctctagctgggcactgtggctcatgcctgtaaccccagcactttgggatgctgaggtgggaggatcacttgaggtgagtaattcaagatcagcctgggcaacagtgagcccttatctctataaaatattaaagaaaattagctgggcatggtggcctgcacctgtagtcccagctacttaggaggctaaggcagaagtatccattgagctcaggaatttgaggctgcagtgagctgtgatagtgccagatgtggagctgtactccagcctggggaacaaacaagcaagactccatctctaaataaaaaagagtgtccccctaagatgctctgcgaaatattgtagactggttgccctggagcctcatgcagggagtgaggaggggccaggtctgtctgtgcttcccagagtagaagatattaagctagaagaatgaggggaaagcattcccggcagaggaaacagcacgtgtttcgggttggcgttgtaggagtgcatggcttgttagtgaagggtgaagttctgtgcagctgggcgtagccttcccgggaggaagcagtgagagctgaggctgcagagggtagtgggggtgtcttggcaagggtctcatgtgctggcctgagggcactgtggggagggggcagacttggtaactgggctgggggctgattgtgtctgtgctttgggatgtgccggctggtggctgtgaggaggggaacaggaagcttggaggtggagaaggtgggttgtcatccatctcattccaccagtgggggacggggaggctcagagaggctgagtgactcactcaaggtcatgcaggcagtgagcatggaggtgagactggggcccaggcccgtgggatgagccattggctgtccccctaccccgctgtgacctcagctgcacctcgtgctgcggtgacaaggtgacaggttaaaaataaagcactgtggtgctgccagacctttattggcacagggtgagggctggttatgtcactttaaagaaatacttctctgcaagcatcagttgagcatgtttctccccagatattcacctgggaactgagtctcgagaaataacgttcgttacagctgctgtcccataaggactgtcagggcaggctcaatagtggccaccactgaataagtgcctactgtgtgccaggccctacgtgggaaagtagctcataccttaaagctcatccgtgggctccagctactgcccgtgctgcaggtgcctcccgttatcctccctagggatgaggaggggttacgtgaggtcacacagccagcaggtgtcatcagagcccactgctctcagggctgcaaacctgtggccactctacaggagcaggaaggagccggtgttatcagtctggctctgcaggtggagaagtggagggtcgtgcccaggaaggcacaggtgaggggcatttcactcctgagggcctcaccttctgtgattctgcctgggactcccttccctgtatctttgtcattattcaggtcccagctgaaaagtcacctcctccgggaggcctccccggaccaccctccatctggagttgtctgtcactggatccaggtgcaaagctctggaatgaaatgagcctggcgtgttctgtggcagcaaggaggctggtgtggccaaagcagagagtgggaagggtgggggtggaggtggaaaaacgacgtggtccaatttccatttttacagcgtcagtctgcctgctgtatggggcatggactttgtggggggcaaagtgagaaccaggggatgactttggaggctactgcagtgtaggagtgagcaatgatggtggcttagaccagtggcttagctccagaggtctggacaggattaaccaatttattcaacagatatttaccagacaccttgcacgtgggaggaactgagccaatgggggatctgtcagtgaagggacaaacacataaacattcaagagcatgttggggtgacagtactgctaagagggaaggcggggagagggctgccaagggacgggcactgttcatttagggaggtgggcagaaggaggtgcgaggctcagatcccccttcaagaaagactttgctgtccagcctcagggcaggcagtcgcttgactgcctctggattttggcatcttcaggatctgcctctcccactgaaccaaggctgttctttctggcagccctcagccaatgactgccccctggagggatttctagggcctgcccatttctgcacacaccaggactctggcaggcagcctttgccctggagcttgctgtcggttggctgagagggtcagtcacacttgcatggctgtcgggaagctctacctgcccacactggctcttctaccttttacctttaacaagtgtgacctcccaataaacctcttcactcctaactgactcagcatccaaatacagggctgttttcaggagtcgctgtgctgtctttgcatccacagatgtcacgcacaagggttccaggcgctctgcaccctcatcagcccttgtgtctgtgctttgggatgtgccggctggtggctgtgaggatgggagcaggaagcttggaggtggagaaggtgggttgtcatccatctcattccaccagtgggggaccgggaggctcagagaggctgagtgttagccatcctaacaggtgtggttgtgccccattatgacttcttcttcttcttcttcttctttttcttttaagacagagtctcactctgttgccccggctggagtgcagtggcatgatcttggctcactgcagcccctgcctcccgggttcaagcagttctcctgcctcagcctccggagtagctgggattacaggtgcccaccaccatgcctggttaatttttgtatttttaatagagatggggtttcaccacgttggccaggctggtctcgaactcctgacctcaagtgatctgcctgccttggcctcccaaagtgctgggattacaggtgtgagctaccgtgcctggccccattatgattttaatttgtaattcccccatggttaaaaatgttgagcatctttttatgtgcttatctgagacttttaaaagtctcatggttttaggcttcacatgtaggtgtgtgatctgttttgaaccaatttttctctgagatgagaggcctgtgtcccgttgcgtttttgcatatggatgtccggttgtttcagcaccactagctgaaagatcaccctttgcacctgccccaggcccattgcagacgctgggtcctttatcctgtaggaggtcctgccttctgggtgtatctatggcttccctgtggtgtccctgggcacttctctcctgcccctctattttcataatcagaaatccgcagagcgtttattagattgagcctcaggcctgtttttcttggcaggaatgcttggttattggtgaggtgggcttcccagtgcatcccgccagaaggcacccagtgtccagtgttcccacgggtactggagcacagggtgaccagtgaggtcgagggcgagaatctgctatttccttggttagcttccttatcataccttcttatggtttcaccgagacactcaggaaagttagattagggactctactagatgattccaagaagctattgttgctttgttaggtgtgataatggcattttggttatgtaaggaagtgcccatatttttagagatgcatgctgaagtgtaagggcgtgattttactttaaaatctccagtgaagaaaaaataggcaagagaaaaaaaagggagagatgaagcaagtgtggcaaaatcttgataatcgccgaatctgagtgactgcatgttttgaagatgagtaaatgttttcagaggccgaggtctggcttgcacaagtttcccccaaatgctcccccaaccccaggttatcaggtgaatgtgagccgctgggagcatttagaggctgtctgctacctgtgcttgggggccgttagctgttgctcttcttcccgtctctctttcctcccctctttccttttctcccctcttccatcttttgtccccacccttttccaaagattccgggctgaccctcggcagagcccccgcttcacggcctgccctttttcataaggaccaccagagggcgccatgatttaagtctgtcgctgttcttggtgctgaaattctgacagcgggtggagcacatgatgggcccgggagctcctgagggcttcagccctgttttctgttcctttgaaaacgaacacacctttgggtctaagaaatatactgttttatattcccaatatgtggtccccaacctttgcatccctgaggttggaaagagaagggacggctgagatgcttagtgaagggtgcaggcctgagaaggctttgtcagaatctaccactcaccagctgtgtggccctgggctagtcattgcacatccctgagccttgattttttctcatctgttaagtgggaatgataaccacagctcctttaagaagttattgtgaggattaatgagatgctgcagattttagtaatctcaagatactattattcctattgctatgaccactactaatactttttttaaagcacatgctgtgtgtcaacggcccctccagtgcaccccctcccaggtgtgaagtcaggagatgtgatgtccaactcaaccctgccttgcccgtgatcaccggtttgactctggctgtactgcagccacacttgaaaccttttgccttcctcttatggaagatcctgaccataaacctgaccttgcagagttcccatggatatgtctccaaagctctgaatacagtggccagtgcaccattgatgctaagtcagcgacagctgctattatcgttctcagggcccttctcgtttagccacgtgttgattctgtgctttgtgggtcccaataactccatctctccatgcttctctggaaactgccccacgcaacccccccaccccccacccagggaactgtggtgctggggcattgccttccatagctttctacctctattcccacaaccctttgtagctaaatcaacagtagatgttggtcagcgaaatactgattttgctacaatatcttgcttgaatccatgtgatggccctaagagagaagcaaacgttgccttactgtgtttaccttacagctgaagaaactgaggccctgaagaatgaaactgcccacccgaggtgccccagctaacaagagtcaggcagggaattggggattcttagaaaaagagggttgctcagagattctataggagaaactgatgtcagagaggtgcagccactggttcagaatggctgagtgcattcatgtctgagctgggatgggaaccaggccccctgaccttgtcccagagcctcttccttggtgtctggttctctgccttgagcctcatgggtatcatggaaaagagacttatgtaaaagaaacatgcctggctttatgacacctgagacttaagacagtaatttttggtgattagtcttctggcatacctggtccctcatggcctgcaccttttaggcatttgattttgtactcacttgtgactctaaagcaccttgttagtggaggtaaattaacttattgattttgagctccactgctactatgataaattataacacgatttcagtcattttgttgtttacttaggcagttgttgaaatactggtgcgttggtagaacttctgaaatgaatttttaacaaatccctaaaaactatgtgagcttttccaaaatgtctggaggaggcaataggcctgactttttcattaataacgtatctcctggtgctggtatggtgagggtgagcccgggagagccccaggctgtggggacccctttgagaaccggcctggcattaggcagcaggcactggaaaaagtcgtcatccttcctgacactgcatttacactcttggggatttatcctgaggaaattataaaaaaaaatttaagaaatctccttctgcctaaattcactgaagaattatttgacagtaggagcaacacaaaataaacctggaatcaacctcactgtgcagtgacagggacattgttttccaattgtagcattggtttgcttctgggagtttgtgctaatttgcttctttggggcatccacagttgcagagcacagggagaagggtgttagctggccagcagtttctatttcaagaggaagactcttgcttatgcttcttccttttctgcccgagcacagggggacactttgtgcaaataatcacatacaatttaggaatgcttttggagccgggtgtgctggcttattcttgtaatcccagcacgttgggaggctgaggcaggaggatcacttgaggccaggagttagagaccagcctgggcaacatagtgagatcccgtctcttaaacaaaaattagctgggcatggtggcccacacctctaatcccagctactcaggaggctgagttgggaggatcacttgagcccaggagtttggggctgcggtgagccgtgatcatgccactgcactccaacctgggcaacagagcaagaccctgtctctaaaaataaaaataataatgataataaaccaggaaagcattcatctacaagtaggaggaaaattgactagagggacttccggtagctggaactgaaagagatagggctgcaaaaacattttcaccgtaaaaggcaaggggtctgccatccagagctcatggcttggctgggtgaggccaacaggaaccaggctccactgtctttctgctctgccaagctcagccttggaccagaccctctttctttgagtctggttcttgtccttcagtaaacaaatggggccagggtgaggatggttggggtaggggacactgggcttctttttcccctccttgtgggcagtccactctggggacttgagcgtcttccatggaaggcagatccttggatgagtgaaggctgctgtgttgacagctcagctcgggggccgaaagtcagagatgagattcctcatgggtgttacggagagcagacccacgtaaaagaaacatgctcggctttaccacccccagtactgcttggggctgtatcttaggtgtgggtttcttgctcatggtcatgaggtggcaactggatgtccaggcctgggatgtgaggtcataggtagcaggacgggcagggcaagggagcctgtttcctggcactccgcgctcacgctttatgtgacaagctgggtggcccctagctgcttctccgtctccatgtcagccgcttggttaagcatggttctcaggggtcccttggccagctgtcctgctagcagctgacatcaggggagaggccagctaatttttgtatttttagtagagacggggtttggccaggttggtcaggctggtctcgaactcctgacctcatgatctgcccaccttggcctcccaaagtgctgggattacaggcatgaaccaccacgcctggcctggtatttgttgttgtttttttaaccattgccatttttttttggtgaccatgttcattggctgccctggttggcccataggaggcagaggctgagctgggtggaattcagtgtgtggggtgtcgattaggacgtgctcttggggtccatgcctgattgatgagggaaggcagcaggattgggcagagggagagctgagccgagttgtagtccattgacagctgtggctgactgtgaggagctcaggggctgcggtggtgcatccacgccgtcctgccttgggcccagatggctgcttcttcacgcttgcccagtcacaggaggcgatccaccctgcaggtgtctcctgacagcaccccgcctgctgcggcaaagatccctccttgcggggcgtctgggtggcccctctctgagtccactctgttggccaaacatgcttctgttctttgaaatgcaggcctccctgctttttttcctgttgggttgtcttccaaaaattgattacgacaattttgtccttctaatatattctgcacatgaatcctgagttcaaatgggttgtaaatatctaaggttgtggctttttcacttaaactttacagtggaagcacaaagtctggttttctatttcttctcgtgtcagtgttagtgagctgtatttttctagaaatttatctgtttcttctaagttttcacagtaatctagcatgatctttttttctttttcttttttttttttgagacagagtcttgctctgtcacccaaggggagttcagtggtgtgatcttggctcactgcaacctttgcctcccaggttcaagcaattctccctgcctcagcctccctagtatctgggattacaggtgcctgccaccatgccaccatgcctggctaattttttgtatttttagtagagacagggtttcgtcatgttggccaggctggtcttgaactcctgacttcaggtgattcgcccactttggcctcccacagtgctgggatacaggcgtgagccaccgcgcccaaccattctcgcgttatcttttaaatctctgtaatgtgttctgtcctgtcaaatgcattcttccttagttaatgttgttggaggtttgttgactttattaatctttttgaagatgatcatgaggtttgggggagcatcccctaggcataggactggcttctgcctccagtgtggcctctgtctgcggcatgccttgtttagtgcagatctccaggggttattgttgggcgaccagggacagtcacagcacctctctgggcttcagtttgttcacatggtggctgggagtgagcgcactgctccctaagctctgtagaatgtcactgtcccttttggagggtactgtggtctttcattgtgatcacgagtgcatttgacttagctcctggataaaggacaggaatttgtcatgaatcccttaaagtacttggcagcttagcccatgctaggtcttcgagaaatatttgttagatgacggaacctatgcagcgagggaatcagtagctcagtcagcaatttcctgccttctcagggattccacttggttcccctcctccctttttttaaagttagaaaatgactcacatggctgggcacagtggctcacacctgtaatcccagccctttgggaggccaaggtgggtggatcacttgaggctaggagtttgagaccagcctggccaactctactaaaaatacaaaaattagctgagcgtgatggcaggtgtctgtaatcccagctactctggaggctgaggcaggaggattgcttgacctgggaggcagaggttgcagtgagctgagatcgcgccactgcactccagcctgggtgacagagtgggactctgtctcaccaaacaaacaaacaaacgaaacaactcatgatcccctgcgagggtctggtctggtcagggcagggtttttgaggatctgaccactctgtccacctctgctccagcgctcctgtgtgacagggaacctatgtggtggacagcaggcagagagaaacagatattaattaattaattaattaattaatcttgacctgtattctagtaactcccaaatgctgcaaccctcaggtggcagctattttggagaatggaggataggacagtgctggttgtcttcccaatatccattcttcctggatttctggctaacagccctgacttaaatcagggggctgtgtgtccagctgaaattcatattcccaggtctgtaattcagcagaggtggccatgggaccctgttctaaccaatgggacataagctgagatcactgggtggggcttttgggaaagatcctccacagagaatgactcagctggcccctgccctttcccttgttttcttcttgtctggaatgtgatggctggagcaatggcagccattttgtaatcatgaagtgacttgaggacaccatatgctatggatggagaagcagatagacagaagggatctggagccttaaccacaacacagagttctgctccagtgctggattgctggcctctggctttattttataaaagagaaaaaccctacatttcttcctagctttctaacacagctcctaactgatacaggctgggaagcccaaatggagatttttgctttcttcccatgtatccccatcagtctctccctgatgcacaaggaaagaccattctgagcacacccatcttcatgcagaaaccacatgtgtggagcccttatgcactgtggtgggaacgtgaaatggtgtagccactttgggaagtagtttggcagttcctcaaaaggttaaacatagatttatctcatgacccagcaattctactcctaggcatctaccaaagagaattgaagacatccatccatacaaaaagttgcacatgaatgttcatagtggcactattcatagtagccaaaaatgaaaacaacccaaatgtccatcaactgatgaatgggtaaacaaaatatggtctatccatacagtggagtattatacagccctaaaaaggaaggaagccctgccacacgctacaacatcaatgaaccttgaacacatcatgttaagatcatgttaagtgaaagaagccagacacaaaagaccacatagtgtatgattccatttataggagatgttcataatcagaaaattcatagagacaaaaagcagattagtggttaccaggggctaggggcttggggaatgaccattaatgaacatgtggtttctttttggggtgatgaaatgttttaaaagtaaatcatggtgagggctgcacagctctgtgaatacactaaaactactgaattgtacactttataaaagtaaagtgtgtggtatatggcttatgcctcaataaagctgtgattaaagactgcatatgctttaaagtgagaagcttggtgtcattggagccaggcgacagagtagggcagggctaactgcagggtcctcacgggcctggggcaggtggccacgtggccagtttctgccttctctagtggaatagggtggtgtggtggttaggacccagacccctctacccacacagctgcacgggcttggggagatctagtttctgtgcctcaggggcctcacttgtcgtatggggagactcctgtatcgcccgcaaggttgtggtgaggctgagcgagggtaatcgggaatgcctagtgcagcttccgcctgcagggacactcagcaaaccccagatctgattcttccatttccccacgcacttgccacccttgaccactgcctggtcggcaggcgcttctgtagtctgggcttgagaagaactttcagaatggtagattttttatcctttattttttgaaggggagaaggaaagcagtggcaggaatcgtcctctgtgatgttacaacatattataaagctcagtcattgaaatagtctggaagttacactagacttgggagagagaccggtgaagcgtgacacaatacatgtgtgagtgccctgtggccgccagagcaaagtccacagactggctggtttaagacaacagaaacgtattgtccccagttctggaggctagaagtccaaggtcacagtgtgggcagggctggtgccctctgagggttatggggggaatctgtcccagcctcttctcctggcttctggtgttttgcccacaacctgtgccactccctggcttgtggaagcctcatcccaacctccacctccatcctcacacggcactctccctatgtgtgtgtgtctgtgtgtccaaatttccgccctctctctcttttttttttttggaaggacatcaggcatattggattagggactcagcttaatgacgccatctcaatgcatttcatctgcaactaccctatttccaaataagatcacatcctgaggttctaggggtgaagactgcagcatgcagattttagggggaagcaatctagcccttcctggtggaaagtcagaagcaggtttgagctgtataataaatcactcactgtgtaacgggctcgatatttgtggagcacctgctctgagcaggtaccgggaaacagcagtgatacaccgacaaggtccccgcccacgagtagctcaagcagcagggccgggaggacatttcatgacggtgcgggggagcggccagctccacgcgtctgctgcctttgtaacgagaacaagttagagggacagactgcattggcggccggctctttcgtgaacgtagcacgtggtgtgggtggtgcaaccgctccaagcctgaaccctgagcccctttggccaagggaacatctgctgccacggtggatgacttgaggttttattgtataatttcatttgccgtgttattggcgtttggaagatgacgtgacctcatctcattttcctttgcctagtgaaaatagcaggggattgattttgttcccttcccaccattgggtgtgttcagcaccatcaacacagattgttaaatcatccttgtatgtttccgttttgctctgaaacgcttgcgtcgctggggacgatgaacttggctcaatgcacctgtgtgtcggtggaacttggcagatgggcggcgggcacctctccatgccgatatctgtaccccgaggaagcgtccgtggggtggggtaaagagccaggaagaggggaatctgggtttgattcccaaatctgacgccccagctgtgggacctgagacaagtcattcaacttgtaggggtgcccgcctcagtgggccgttgggaagattaaatggaatgatgaatgcagaactttttttttggattgtttttaatgtggtaaaatatacataacataaaactaatcattttaagcattttcagtgtctaattcagtagcatccggtacattcctattgtcgtgcaaccatctccacgacccatcgccggagctttttctttgtacccattaacaccaactctccataaccccagccctggtaacccctattctgcttcctgtctctatgaatttgactcctccaggacttcatataagtggaatcacacagtatttgtccttttgcgactggtttattttatttagcataatatctttggccgggcgtggtggctcacacctgtaatcccagcactttgggaggccgaggcaggtggatcacgaggtcaggagaccgagaccatcctggctaacatagtgaaaccccgtctcttctaaaaatacaaaaaattagccaggtgtggtggcaggcacctgtagttccagctactcggaaggctgaggcaggagaatggtgtgaacctgggaggcggagcttacagtgagccgagatggcaccactgcactccagcctgggtgaaagagcaagactccatctccaaaaaaaaaaaaaaaacaaaaaatcttcaagttcgtctacattgtagcatgtgtcagaattttattctttttttcaggctgaataatatttatggaaagggttaatctgtaaattgccatgccactaaaaacaaagttttagaaggtgtgtaaaaatcaatgtttgaaccaaacagaagaggtgaactgaaaggcacactctcctttcccttcaaccccagagccattccccatgtaatcgcctgtgcatcctccagacatttctctgcactgatgagcatttatgtgtgtgtcctttgtttttagacctccatgctatgaaccttgattttttcccctttgatgtcattcttccttttttttttgagatggagtctcgctctgtcgcccagactggagtgcactgcagcgatctcggctcactgtgacctccgcctcctgggttcaagtgattctcttgcctcagcctcccgagtagctgggactacaggtgcccaccaccacgcctggctaatttttgtattttcagtagagacagggtttcaccatgttggccaggctggtctcgaactcctgacttcaggtgatctgcccacctcagcctcccaaagtgctgggattacaggtgtgagccacctcacctgacctgatatctttccatattggcacacacacatagaaatgcctcatcctgttcaacagttgcttagcatccactgatagatggccatgtcttatttccccaggtccatgctgatgtccatgtatgtcgtttaccaatacttgccattacaaacaacactggaaatgattgttcttgacagaagagtgagatttacacctgaatccctagcagacaaggggcctgtgcattgagaagcctcacattgtcaaattgtcccctgtggagctgcccccttctccactgcacccaccctgcacaggaggggctttccccactgataacactcctgcggggtatgggccacagggcctttttttggtcactgccatatttgaaaagtgctacgtttctggtttaattcacattcttttaaaatgatgagtggacacaccttttttcacttgcctttcttcttatgtggattaaataattatttctttttctttcttcgtgtgtgtttctttttatgtgaatgactggtgagtctccttttctcacttttctgcagagcttttcatctttgtcttcttgttgatttgtaagagttctttacatagtgaggaaagtgcactgtgcatgctagttgttgaaatctgttcaactcagggtcatctctaaacatcttaccttctttgaagttacccataaaactttgtgtgcccctgaaacagcaatgtttccttccataatcccgggtttatagttcctatccttcaccttgaggctgagaggctctccttcagtgtctgttgataatttacctaaccctcatcccttcctcaggctacacagagtgaggtggggaaaagatgatggtcagatgctaaggaaggagctggaaagaagctgtcaggggtgggggtggtgcgggactaacactgtgataaaggcagccaagcaacctcaaggtaagtattagttcagtggactgcagcgtggggtgttgtccctgccacagggcatcagggaaggcttcctggaggtggcgacagttcagctgagccacagtgggacctcagtggccatgtgctctcatccgcaggctcagaagttggccaggaaaagctgtccctgtgcctgagtgggctgtgggcctgtatggggtggggcggggcttctagttccatgtttttaagcgggagtgacctggagtccctagtgagggatttcgtaggctgtggggaaatagctgctgcggggtgaagtttgaagacaaacgacagacgggagatggggaggagtaaccccatttggggccaaaatagcccgaggggaaggtggtgtgtcgtccccatttcacagatttggaagctgaggctcaggcggctcctgcagccgggaggagggaggcatttccaaccctggcccagggctggctggagctgtgccgggcggcggccagggcggccgtgggtggcggtgctcgcgttgcatgtggtgtgtggcggcgtgcatgcaccaaggctctttgattcctcaactttagtttttttttctgattatagaagtaaaatagaaagaagaccttttttgaaatgacctgtgttagtcacctctctcaggatgcgtgaggcggacacgttgaggccacctcagctgatggaagtttccggtaagaagcccgttctcacagccgggcagcagcgccggtgagcttggggacgtgggctgtgggtcacaggcgcccgacacagcgccagcctgacagcgggaagccgaccccaccgtgctgggatccggtccctcccctgctctggcccctgggcccccgaccctggctcctgccgcctgggccctggccccaccccaccagcccccattgccgcccctgtctcccaggccgatgggtgaggcccccttcatgcgccacctccttgtggactgtggcagggtcactttgtcaggcagctggggcaggagccaggagcgttgtttactcactgggccaacagtgttgagtgcccgctgtggccagcactgggccggcccctggggtcgcagcagtgggcaagcggacagtgactcctgaggctcacactgagcggccgacccagacagacagagtcagtctgttaactagaccccgactgggggcgagtgccatgagaaatccaccagggcagccatgcggaggcggggttgtcactgcgaagtacagggtgcaggaaggcgcccgagggagtgtgcgggccgtgcgtgttggggggtgtgtgttggtgtgtatctctttggggctgtgtgtgttgatatgtgtgtgttcatgtatgtgttgatgtgtgtgtttaggatgtgtgtgttgtatgcgttgatgtgtttgtatggtggggcatgtatgttggggtgtgtgtattgatgtgtttattgatgtatgtgtgctgtatgtgttggtgtgactgttggagtatgtgtgttagggtgtgtgtgttggtgtgtgtttgttgatatgtgtatgtgttggtgtgtgtgttgtatgtgttgtgtgtgtgttggtgtgtgtgtatgttggtgtgtgttagtgtacgtattgatgtgtggcattgatgtgtgttgatgtgtgttttttgatgtgtgtatgtgttggggtgtgtgtgttgggatatgtgtgtgtcttgctatgtggtgtgcttactgtgtgtgtatgtgtgttggtgtgtgtttgttgatatgtgtatgtgttggtgtgtgttgtatgtgttgatgtgtgtgttgatgtgtgtgtgttggtgtgtgtatgttggtgtgtgtgttagtgtatgtgttgatgtgtatgttggtgtgtgttttagtgtatgtgttgatgtgtatgttggtgtgtgtgtgttgatatgtgtgttggtgtgtgcttgttgacatgtgtgtgttggggtgtgtgtatattggggtgtgtgtgtgtttggggtatgtgtattggggtgtgtgtgtgttgctgtgtggtgagcttattgatgtgtatgtgtttgtgttgggatatgtgtatgttttgttgtatgttgatgtgtgcgtgtattgggggcgtgttcacacataccttttcaccgagcagcctgctatgtaacggccacccgggtcgacgggcctgtaggtagatcctcatttattgaaccaatttcctgtgttggacattagagtgtttcctggtgtgctcagttataaataacgtgctgccatcttgggtttctacccttacttaaggcacaaacaacatcttcagagagtcttaaagtctgcaatcctgcatttggacggcaatgtcaactgcagacttacggtccccaggcagccttaagcagctgtgcgtcataggcattaacgacataaaacagtatgtttccttaggcccagtgccggccatggggtgctgagccctggatggctggtatcggggctgtgggtaccaggccctggcaccccacagttgttctgcctgtgctggggcaccttttgtttggggcaggaggacaggtctttgtgaggaattacagaagggactctcttctctgctggagaaagacctttgctgtttcattttacagccttgtttgagggaggctgggaggctctgcagtttagaatcctgttcaaagattatgctcatgggcctaagaggatttggctgtgaccaacttgtattacatgggctgtttgtttttactcctgccatgttctcttctgggtctcgggcatgtgttcttaggattactttcatttacagcctgagatgattgtgaattcttcaatagcatccaccttttagaaataggaagctttctaaagtcacgtttgcaagcccagcctttccgaattctgtgtcattaactcaagaccagagccgtctctcatccccctgcttacccctgcctccatgcaccatgctgagggcagagcgtgggcttcaccgtgctgtgtaaactgtgaagtgcagtaccccctgtgttgagctcgcctcccactctgtgaatagagcagacaatgctggggatgcgtctcccagcctcccttgcagctagggcacagatacctggccccccggtgctgctgccttgggacttgactcagaatgttggctggcaatgtgaggaacagggaccgggggccatgtgggtgatggtggtggcagcggaggaggcagctgcagtgatccagatggcggctgctgggttaatttgggaagaacaggtgccttcagacactgcttcatcttctaagccaggggctggacactgtgatccttggacatttctgttccttgtttttaatgcttctgggaagtgtctttattttgccttttaaaaacgcagagtggaatgtgcatttaagggaaggcaaatcccgcttttctagtggaaatgagcctgcgcctccccagacagctagatctggagatgctgctgcccatgagttctgcccctttgtttctgtgtttggaaggcctggcccaaaatggggattgggggtgccccagtctggtctgggatgggcaggaattatttcccagcaaggtcaaggctgctcaacactgtgagaaccctggcctgggcatcaggaaacatggcttcctctccagctctgactttgctgggcaaccctggacaaagccctcaccctctctgagccttcacggccccttctatggactggggatgatgatcatgaccaaggcagtcgtgaggaccatagatcgcacttgccatggccaggccatctgtaaagtggagtgttcaggttagagaggacaagttggtgttattggagggaacctgtggtgatgggggagagggtgacctggtgacacagcccttgatggctaaaccttcctgacaatgtcacagggccagcctcctgccctttgcaaagcactggatcctcaaagaataatttacactccagaaaatggaatccatactgggtgggttctatcacgtgtagccttgggggatgagacctgggaagaccgatgtgaatacatgcaggacggggcatccggtgtctgccagctgccacctgctccggacctgggccaccggctctgctgcctcagcctcttcacttgctccattttaatcacagctcactcatcagccttctttggagaatgctggggactgagtggcaaggtagggagactccgggctttaccttaagtggacgtatgttggaacagtaacttcgccccctaataatgataataataacagcaactgaggaagagctggggttcacagagcacctgctctgcaaacagcctgcaggatctttcggtgaaagttgtgaaacatggacatttaggtgctccataagtgttagccaaaaaaaaaaaaaaaggaaaacgggaaagaaacacagacatgattctgctcattcccgctttgctccctcaagtcccttggaggggcgttatctgggctaccagggactgcttgtttcctggcggttgtagctgccctctcctggacgcgcttccttttggtttgggcacacttggtggtcttcctgcacctcggccttttgctctggacagatggcctttgctgtcacgggttggctctgacgtcctttcctctgtgagggtgcacagcacccctgggcccctgcagcctgcctcagcccctcctcactgccatctgcaccctcagaacatgagacttggtgggtgcttcctcgagggactgagaggcctcgaaggacactgccctggagagcggtgccggctgtctcagggtgggaagcctccttggtgacactgtgtgaatggaaccccacccgcccttgctgcctttggtgccaccaggcacagctcctggccccaggaggggtgatctttcttggggatgccaagctggctctgtggtccctgtcactcagagcgggctcctcccctccacacacccattttgagaccccagagcacagtgatgccgcagctgcacttaacaagcaggaatgtgtccctcctgttggtcaacatttggggcctcactgtgacaggtgcacagcagcctggtggagaaccaccctatgcgcctgtagaaagggccagatggcaggagccaccttgcgttttgccttgaggtttagttgggatggccacttacagtggtcgcagccactgttctgagagctttgcatgttcagtgggtacaaatctcatggttgcctaggaggtaggggatggggcagtgtccatttggcagaagaggaacctgaggctgagagaagttgattcccaaaaacacagcctgttgtggggggccagggtcccagcccagcagtccagctcagagtcacaccctgctgtcatgttgttacccggacagcgggcaggttcagttgcgtggtgggtgacagtccagcgaccacagccacggagggcttaacaaggggattgtaggacttgcagcaagtaaggaggacaccagggatggtccccaaagcagcgcctcccgggcagaggggatcccagggtttcacggggctgctgggctgagccatctcatggggggttaaagtcagtgcaggtgcggtggcggatcacgcttctacatacgtcgcgtgcatggaaaatggcggataagctcctctcctccctgggtggggtttttaggatgggcttggaccttttctgaaacaaggagaactcaagatgcagttacaagtgggtgctttttcacggtgtgtacctcaaaaccccaaacccgggaccccggcttaagacgtcatattccatgggcggtgctaagggcagagcctggcccagagtaaaccctcgagaatcgttactcttgttgctttcctggggttcctgtaaagcaggcgtggtgccttgtggtttgtgaatctgtgtccctaagacacacgctgtggtgaatgattctctgggactcatccagctgcttcccccagcactgagtgtggcctcacagtgggaatagtgggctccgtcactcgtgcgctctagcctctcctcccattcgctgctgtcccctcccagtctcctggccattgtcatcctgggggaatccttgtcatgggaggccttcccaagcagagaagtgagtggtcctcacccactgttcttcatttcacatacatttattgagcatctgctgtgtacccagccctgggtcagtggctggggccacagcagtgggcaaagcagacctagggctcacggtctagtgggcagagagatgtgggccctctcagcctcgccaattttccctctgggaggactgtgccagggaagagggatgggggatggggtaggggctttggagtcagtggagctgcatgtgaaccgcaacccagtggctttccagcacttccatgggggcacagggctgagcttcaagaatcctcagttttctcatctgcaaactggaggtgttggcacccacctcactgggttgtctggaggctaatggttgatacgttccatggggcccatgcagcttggctcatggtgtgcacgcattgactatgagccccctgctggctcccagcctggccgcttaggtgggcggctcaggtggtgcctagaggagaggccagggctgcaggggagaggccagtctgaggctctttgtcgtgtgtgaaatccctgggttaatccctggccctgcccagagcctgaagtgggagctcctgcgtcgcttccttgaccgtgagcctttgctggctgactaggcctctgcttctgctgccgatgaggctgccagatgttcaggcctacggcccagcagcccctcgtcctccagctgcccccttccctgtccctgtgaggtcccagccaagccatctgcctatggagacatgaataggccagctctgggctgctctgaacctggtgatggcaagaaataaagtaagtttagtgcgcgtccgtgtgaagagaccaccaaacaggctttgtgtgagcaacaaagcttttaatcacctggttgcaggccggctgagtctgaaaagacagtcagcaaagggagataggggtggggccgttttataagatttgggtaggtaaaggaaaattacagtcaaagggggttgttctctggcgggcaggagtgggggtcacaaggtgctcagtaggggagcttttgagccaggatgagccaggagaaggaatttcacaagataatgtcatcagttaaggcaggaacaggccattttcacttcttttgtggtggaatgtcatcagttaaggcaggaactggccatctggatgtgtatgtgcaggtcacagggatatgatgacttagcttgggctcagaggcctgacagtaaggatgggtgatacgttgggctttggtggccagatctgttcctgagtctccctggctgtcagaacacactggctctcagacgccagggtcagatctggtgactggggctccaggcagtttgggtcgagtggaggaacgctctctgatgattcatgagaccttgcctaggtctgcaggatcctgaagattctgaggcagggcgctcaccagctcaggcagccacccttcagctgtcccaccttgcctgggcctgagcacaggccctggaagcccctgttcaggacatgttcacaggcaggcaggaagggccctcccggcccgagccaacacccttcaccccagctccccgcacaagctggccttccggagagccagggcgggctttgcaggccgggaagaggaagagatgtttgcccgggcaggggccgaggacttcccaggccgagggtacagggcaggcagcagcctgaaaacacgggccagtttcacagcccgtaaccaggtggtcacacagggccccgaactcagaagggcccactggggtggatgctctgcgctcaccgtcctgagattcttcatcgtcttatcctgggcttggtgttctataagtggagttgctgggaccgtggatcatgtcctggggcttggagtctgggctcacgggctgtgcctcctttgtcccttccccagctcctgggacaggttctcagctgcccgctctcctcctgctggggccccaggccctgccttctgtccagggtggcagccaggtcacttctcgggtggccattgctcaggggtggcctgtcctccatgggctgaggtggtggggcctgtgggaagggggccaacatctctgttcccggctggggccccatattttggttttgcaccgggcctggaaaattctggagccagtcttgcctgaagagaggtgcattctggaaatggccggagttccatgtggccagggcataaggaagctggggtggtgcctggaggtggggtggggtcgggcggggttacccaggccttggcaagtccctggcaagctgttgaggagtggggctgtgttctcatggtattctcatggcacatgttggttggggcacttggcaggtccatgcaccttggccacagaggctgcatggcagggaggtgactcaccgtctggggcaccaggagaaagagagaggggtgttctgttccgcctggcactgctcaggggtgcacagcagctctgtgggtttatctcacaccagacttttcttagagccagaaatgggcaaggactggaggcagcttgtccggtgcattccttctagcggggtaaaccgaggccctgagaggggacagatccccgctccctggccaaggtcgctcagcgagttggtagcaaatagctaatattaagccagttcgtttggaattctaggcaggaatggaaatatttcaatggcacagataaaaaaactgaggctcagggtggctgaggctgcctgggatcaagcgatttacaatggagctgagattcaaacctgcagctcccgacaccagcctgggctccttctcctccgcattgaagccgtggttggcgtctcccactctttgggatcctggagtaggctagtgagcagctggggaactcggggctggagtgcgagggtggatgggtgggtggcagggctgtaacaaagcctaccgtgatggctgtccccctcctcagggaatcaggcctgattgcacttaatgaggctggtggggaggtgttgagtttgcattttctgctcagtgggaggtggccatgatgcatattcatttatgcaaaaccagggttggttctctgcaccctctcacccctctacctctttcttcctccaattgggtcgctggagcccaaagaccagcccccggattctctccctcctttgccagctttcagccccagtaacaggccagggagatggatggacattctcgctgcccagggccaggcaggcactgcgctcagggtgccctcaacatggagcgttcacgaccaccccctcttcttttcttttcaccaatttaaccattttagagtgcacagttcagtagcatttagtatattcatgttatacaaccatcaccactatctaggcccagaacattttcatcaccccaaaaacaaactgttaaacttgtcagctgaagaattgccaggaccacacactgagcgccgagagctttcttcctcatgaagggctgcagcctgcaggctggctaacctcaggctgggaagcatagcctctggcaggagccagaagcaggcatttccaggaagggaatttatgatgaacgggttagctaagtatatgtattcaacaggctataggaagagctatgaatattcacggagacgtgtgtgcatttgtcataagctaacatgtatgttacatgcatcctatgttgactttggggtagagacttaatatgtaagtattacagtcagggccctacatgtcagaaggtgaagcagaggacgggaagagcctctgtgcagcctctgtagatgagccagaaccatttcaagatcaggactcttatcaagaaggaatgctgggctgggcaacgtggctcacgtgctgtaatcccagcactttgggaggctgaggcgggcagatcatgaggtcaggagttcgagaccagcctggccaacatggtgaaacgctgtatctactaaaaatataaaaattagctgggtgtggtgacgagtgcctgtagtcccagctattcgggaggctgaggcgggagaatcacttgaacccgggaggcagaggttgcagtgagtggagatcgtgccactgtactccagtctgggagacagagcaagacctaccctcccccatccccccaaaaaggacagtctgtgttgaaactgaaaaagaaaggggcagccctgagtggttggttggaatcagcagtagggcaaggctttcgaaagggctggtttctgcttaacccttaagagggaaagcataatggcatttagcgaaggagggggtataatgcagtgtgtctgacctccggtcccattgtggcctggaactcaggtttttttttaaggtttctctggagtccgtttggccaagagggggtccatttagtcatctgggggtggttaggattttatttatttatttatttatttacttattttgagatggggtcgcactctgtcgcccaggctggagtgcagcggcacaatcttgcctcactgcaacctgagcctcctgggttcaagagattctcctgcctcagcctcccgagtagctgggattacaggcacatgccaccatgcccggctaatttttttatttttagtagagatggggtttcaccatgttggccaggctggcctcgaactcctgacctcagatgatccaaccatctcggcctcccaaagtgctgggattacaggtgtgtgccaccacgcccagcttttatttttattgtttattttgttatttatttatttggagagagtgtctcaccctgtcacccaggttggagtgcagtggcaccttcatagctcactgcagcctcaacttcctgggctcaagtgatccttctgcctcagcctctccaagtagctaattttaaaatgctaccatgtgtggctaattttaaaatgtttttgtagagatggggtcttgctatgttgcccaggctgctctcaaactcttgggctcaagggatcctcccacctcagcctcccaaagtgctgggattgcaggtgtgagccactgtgcccggcctatttttatttttcaaactaaatgaaatttagcctgaagatgcctctgtacatgaatcctttcttaatgaactgcaacctaacttagtttgtgattaacggaagcctgacttaggaggggctcttgtaacaaataggtgaagctcggcccaaccacagcagctgagcatctgtcaatccagtcccaggtggccaaccattcaaataaggcaaaggctgagctgtaaccagtcaagctgtcttgaccctctcttccgttttgtgtccataaatgctgcctgatcacggtgcagacgtggattcctagaccctgttctggttctgagagcagctgattcgtgaatcgttttttgctcaattaaaccttaattttaacttgtcatactcagtaagcagtcactcccattcctcctccttctagtccctggcaaccatgagtccactttctgttgcggtgaatctgcctgttctggacagtgcatggaaatggaatcatgcagttcacttacattcagcttctttcatttggccgagtgttttcaaggctcatccaggatgtagctcgcattagaacttcattccttctgactgggcacagtggctcacgcctgtaattccggcactttgggaggctgaggcaggctgatcacttgaggtcaggagttcgagaccagccagaccaacatggtgaaaccctgtctctactaaaaaaaaaaaaaatacaaaattagccaggcctggtggcaggcacctgtaatcccagctactagggaggctgaggcaggagaattgcttcaacctgggaggcggaggttgcagtgaaccgagatcacgccattgcactccagcctggtcaacaagagcgaaactgtctcaaaaaaacaaaaacaaaaacaaaaacaaaacttcattccttctccgggctgaatatgttccactgtatgagtggaccacattttgcttatccattcgtctgtggatggatggatacttagggtgtttccattgtttggccattatgaataaggctgctgggaacattcgcgttccagtgttcatgtggatgtgtgttttcagtgttccgtgatagacacccaggagtggaattggtaggtcacaggataattccaggtttaatttgttgcggcggtaccaagctttttttgcggtggccctgccgcttcacctgcccccagcagtgtgtgcaggtcccgcgtctctcccaacagccaacactcgctttgcatttggattccagacatcctcgtgggtgtgcgttgtctcattgtgactttgatttggatttccctaatgactcatcacgttgagcaacctttcctgtgcatgctgaccattcggtgaaatgtatgtgtccaaggccactgcccattttgaaattgggttgtttgtctttttgttgttatcatccatgaggaaaacaaggatcagagagggtgagtaacttgccccaggccacacagcaagaaggagggaagacagccttagaaacccagtgggcctgactctgaagtcttgtgttctttctttcaaacataagggagctggtggttggggctagggaaggcctttatttcctctggagcagctgcttgggatgcatcctggatttcttgcccctccgcagcacttgcccctctgagggcacagtccttggacatggttctcaacaggacactcctggggaatgtgatcaggaggccctggaaccgcacttggagaaacactggcttggggtttgccataggacgtatgacttcttgacccaaggcttgagttcggagcctccccggtccacccctgccaggctgctgtgcatctgcggcctgcccctctccctgcctcagcttcctcatctgtgtaatagtgagagaggaatgggatcccacagtgcttagaaagccattaggagtatcaggggatggtccctattggtgtgtctgtctgtttgtctgtctccctcctgggcggagtgcctccaaagtgggagctgtgtctggctcagcagatattagccaagaaccaggggccaaggagaagggccccagggcagacccctgctgagacctcagcatcctgtggtatcagaaactggtgcagctggtccctccgtgccctgtggccacttctgggtgctcacgcagccagcccctgggcccacatttgagcagaactcagtgctcaatgtggttcctgtgggggaatccaccatgcccggtgactccgggggccccagccctgccatccccgtgtggggaacatggggctggagggaacacagggtgggaattcttggagctctggaagcaggtgcttgggaagcatgagggtcttggaatctcaggtctggattcacttgtgtccccagctgtggggtctgggggggcacattgtggacctcgccagcctcaatttcccacctctacagtgaggattggtaatgcccgggagtgctcccagcacggctggggttatgttcatttgaacaactactgaatgacatcagccttcctgggtacttacattttggggtctcagaaaagggttaaaggcagcaactttctgcctctgttggagtcccagataccctcttcctggggtagggcagactccaggccaagggaccaggaaaggcagggagaaggcaggagagtgggtgggagggagctgtgagtggccgggagagtgcaggcaggagcggtgcatttcacagagacaggcccatcgggtgaggtttggaaacaacacttctctgttcccagagctcagtggcccccacttgtcatggcccccaaagccattggcttaggggcccccttgcctcttggggagaacagaacccaataagagcaaagtagtcaccgctggaggcaggtttagtgggtggctctggaggcagatggcctggtgtgcttcccggctcttccgtgagctgtgcctcagtttcctcatttgtaatatgagggtagcaataattcctccctcatagctagctcttggatggtagtaaatgctcacaaatgggctgttctgcagatgcagtgtgtggcaagggagagtggccccctggaaaggggaccggtggccagtccaggggaagcggtaccagctcctgtgtaagtgcctcctacgtatgaactcacatcacctcgagggaggagaggagggccctggaggggtgggacgtgggttagggctcctgagacgactcctaagaagtgcatacgcagggagatgaagccacactgaatgggtgggctcctctctggagcactgggaggaagccactgtgtggggtgtcccttgttagggccttgagggggctcaatgaatggcagaagcttctaacccacctgaatgatacattgaagtccccgctttctggctagatcatgggagaggggagccctggtgaatgagaagatcctggaggcagttggtaaagagtgcgtgtctaattgatggtagctcatgtgagcagtggtttacgaccagctgaacacaacatacaagtggcaggataaagccccaaaagccctcaccagcaggtttgcctagggcacagggctggaactgggtgctgtatttgcacattggaggcatcctcttccttcagacaacatgcagtggtgggcacccggcttggagtcagacagacgctgtggccaccgatgctgtgtggcctcaggctggttacttagccttttcgaaccttactttccaagccttgtgcatttcagactctgctaattgagggaattgaatttgctcctcatctgcattctgtcctatcaggataaggaggtatgtaagccccagaggtcatggtgataattaacaagaacaatggacaaagaatacagaaatcagtctccattcggccacttcccagccctgggcactttgcctcctgcacttcagtttctctgtgtgaaacatggctgataactccagccttgagagttgctgggaagaatctgtgacccgatgcagggaagactgcaggcatacctgggcacgtggtgggccttgcataaatgacagccacaccacagctcccaggctccaagctcagtgctctcctgtccctctcagcccctgcatggcatcctgtctccaaagtggaggtgaggaaggctgctgttggggagtgtggagctgcgaagctcatgccatacaccccttggacttgaatcacacagggctgccagtttttattggttttgggctgtgctttgtgccctggggatggccctgtcatgctctgtttcaggcagcccctcgcctgtgtgtgacgtgggtcatttgtcaccctgacagtattgacagggctgctgctggcctgggatggaatccactctgctcagggcagtgcctgagagatcttgtccagaaggatgtgggacagtgagctgctcggggacagagttgccctttttttgggtatagaccatgctaccccctgcggtaatgttggctgttgacagaggactgctgtgagcccagcccgggccggagccccgcttgctgagtgtccactccgtgcctccctcctcctctgcacatctcccaccctggggcaggcaccattgtcattcttgaggttcttaggacccctctcaactccccagcgtaccccttcatccactcaccccctgtagccagagccattggtctaacctatgaatctgatcctgtccctctctgcctgttaaagcgccttgggggctccctggggaataacacccagcccgtcctgtcactcttctgtcccctctgagggtatcatgccctcatttcaaataaccaggcagaattgcaggggcaaagcagctcaccccaggtggtgagatatatatgagcaagccaggacttctggttacctgactgcaagcccacaccctcatctcaggccactctgtctcctccttccttttctgcagttttgtgtctctgtggatcactttcaggtccttcttgctctcccacactggtgtttgaggggcttggttgctggcacacagcatgcatatcagtattgcctggaagagggcaggatctcccaccctctccctgttagctcctctgttacccaacttgcttatttattcattcatttaatgaatatcattaagtgcctgtttgtgaataggtgcggacagaatggggctgaatgtacatgcctcaccactgagtagtggaggcacagaattatcaaatgggcaagggaacagcagatgcaaaggccctgtggcaggaggcagcatggcccagaggcctgtgtggctgcagaggagagggaggctgcatgacgggagctggggctggggagctaggcatgggcctgtcccgtggggcctgggtggacttttagggttttagctttctctgtggctctcaaaagcatggggcctggctctgttctccctcctcataccacagggactattttggcttgcactgtgatttatctcttcctaccacagttcccttctttcctaggtgccgtgggggctctcatatgactccagcactaggcaagccctgtaacctaaggctcctagaaacttggtctcccaacatagctgggggcccaacacagctggtattctaggggagtcagaagggtggatggtggcagaatgctcccctctcaggagtctgctcactatcctctccattctgtcttctgaaagagatggtggagaattgctataatttcttccttaaatatttgttagaattcaccagtgaacccatctgggcctggtactttctgtttgggaaggttattaaattgttggttccatttctttttctcttttcttttctattctttttttttttttttttttttttttttttttaagacagagtcttgctctgttgcccaggctggagtgcaatggtgtgatcttgtctcactgcaacctccacctctcgggttcaaacaattctcctgcctcagcctcttgggtagttgggactacaggcgtgtgccactatgcctgggtaatttttgtatttttagtagagatggggtttcaccacattggccaggctggtctcaaactcctgacctctgatgagccacttgccttggcctcccaaagtgctgggattacaggcctgagccaccacacctgggccatttctttaatagatataggcctatttagatagtctatttcttattgtgtgagttttggcagattgtatcatttaaggaattggcatttcatctaggttattaaatttgtgggcatagagttgttcacagtgttacttgattatcctttgaatgtccatggcatctgtagtgatgtatcctcttgcatttctagtattaacagttgtgtccttctcctttttccttgttagcctggctggaggcttattaattttatcgatcttttcaaagaaccagtttttgatttcattaattttctctgttgatttcttgttttcaattttatttatttatgctctaatttttattattttcttgtgtttactgtggatttaatttgctcttcttttcctagtttcctgaagtggaagcttaggtgcttgattttagatctttcttcttttctaatatgtacattcaatgttataaatttccctctaagcacagcttttgctgcctctcataaattttgataagttgtgttttcatttttaattagttcaaaatacttttgaatttctcttgagacttctttgagtcatgtgttatatagaagtgtgttgtttcaatcctctccattctgatactgtcaggtggggtttttgcttctttttccgctttgcatgacagactcccttctgcctggagacagattttctggcctcacctgggactgtgcacaagtcattagctgagcctcagttttatcatctgtagagcagggggcaaagtaccaacttcccaggtaatatggacctggagagtttgtaggtaggggaactggtattggaacccctgtctacctggcttccagaccccagtatttccccttcttcccacactgggctccaaggtgggcctccaggctcagcatgatggactgttgaaatgataaatgaaaggaagaggtgcatcaggggaggggatgcatttctgtaggaagacatcccaaagagccgcagggtaatttcttctgtcttttttttcctagttgtgcaggccgggccctctcacctcttagaacctcagtttcttcatttgcaaaatggggaaaatatgtattagagatggataataacagcagcacctgacgtgtagggagtactttgcacatgccaatttccactgtcactgagatcttcatgtggcttctgggaagtagtccctcttatcattgccacttcacagagaagagagtgaggctcagataggctaggtaacatgcctgggctctcctagctactgagttgtccagccaggttttggacccagataggctgactccagggtgagctgttgggttgagattcagttgtgtgcccagcatggtgcctttcacacagggcaggtgccgggcaaggtgtggttctggggagtcagcatcacaggggaagatcagtcctgtccctcactcagagacccctgtctaccttctgccaggcgagcaatctggtgggcttgctgggaaggaggccacatattggcatcagggtctccctcccgcctggggctggtgaaggggaaagccactcacagttattcctgggagtgtgggcgtgggaggaacccactgcagcagggctttttaaagaaaactctgccttgtctataaatatcctcctgacgtgtccccagttcctgagcttctgggacagtgaggcagtgccctgcctacatgccactcgccaagactgctgagtgatttcgcagtgggagggagcttggggtcagctggggcggggtttcatgaaccagtgacatctcccacagacactcaaggggactgcattgcgccaactgtttatattgccaggtgaggactaaaaacaggatcccttatgatcactctcttgtcagatatgaaatgtgttaacgccaaagcatgtagaaaagtaaagtgcaggctagcaaatggaatattttcttttaaatgaaaaactcgctgcagggtccatgctgttctaattcctccagaattttatagaagccacgacaggcagcacacgctcacagggcctgggaggaggagtcatgggcccggcagtactgcccacacctggggcagggtggacagatggacggatggcctggtccaggagctgggcatcctatcaggccctgcggatggggagttaaaggctagccaggccctctctgaggtgcagcttgctcagctgcacagaggagtggtggtcctcaccttgcaaagcagcactgcgggtaagacgaggcaacgggcaggaatttgctgtgcacacagtccttgtcatcatcctcttttcaggctgcaatgccaagaaactctcccaggatggtcctggagcccccagggcagggttctggggatgtgtggaggacgatgggcagtcaggaccacactgtggtgggtcctaaggacgcctgccagaaaaacatcacgcatgtggataggagttgaattgcatcactcccctcacccaccaccaaatacttgttgaagtcctaattcagtttctcagaatgcgaccatatttggaaataaagtatttgcagatgtagttagttgagatcaggtcatactggagcaggatgggtccttaacccaacatgactgatgtccttataataagaggagaggagacacaatgacacacacaggagaactccttgtgaggacagaggcagagattggatgctgcagctacaggccaaggagcaccaaccattgctggcaatgccggaagctgggagaggtgaggaagaatcctcccctggatccctggtggctctgccggacacctcgatcttggacttctggtttccaggacagctttacagtactttattatggcagtgctagcaaacaaatacaagcacctaacttagtgctggcatgcagttggagcttgataaatgcttgctgaatgaatgatatttattgagtgcttactacataccaggcaataggcaaagggattagatgatagttaaaatttctcgtgtgtttatatgcaaggcattcttgtaagcacgttagaagtactcactcatttagtctgcatgacagctctttgaggtgagtactctgtggttctctttttgtgcatgagaaaaccaggacacaaagagatgagtctcttgcccagggtcacataaacagctgagttgagatccaaaccccatcagtgttaacttccaggctcttgctggttagccctgcaatgctgcctcccagcctttggcctggcacagagtaggtgcttgggaaatgctcaccatccagtacttgttgaatgctcttcccagctgtgccaagaaggttctggttctatgagagtgttcggttgtcaaacaagagaagtattttgctctcttccccagtttgccagagcctccagttgactggttaagatttaaccattaagagctgatttgattctacctttaaagtgaccagccgccacctgtattagcatcctgttgtgggtggaattgtgtcccctcaaaagatatgttggggtcctcacccctgatgcctgtgaatgtggcctcatgtggaagttgggtctttgcagatgtaatcaggtgaagatgaagcaggacctactagattagggtgggccctgatccagtgactggcatccttagaagagacacagtcataccaggagaaggccacatggtgatagagacagagattgtagtgatgcagctacaagccaaggagtgcccaggcttgcaggcaacacctgaagctgagctaggcgtggagcagaccctcttctggagccttcagagaaggcatggccctgctgacactatgttttcagatttctagactccagaactgggagagaatatgattccgttgtttggggccacccaggttgtgatgttttcatggcagccctaggaaatgaatatccaccccaggcattgcagagctgacctgtgcttgtcctgcactaatttctatcccacattctttgggcatattccagaacccggtgtctgaacctccccagcataatagttcagaccattggaacaatctctttttgagttcagagcctgtgggaggtgagtcctacaaaaaccaagggccctggggccagccactgggggacaaatactcagctccactccttatcaatgctgagaccttgagccagccaggtcacatctttgatcaccaatcacctcttctatcaaagtggccataacaaaattgccttgagacctgtgagggttaaagggggatagatgtacaaatacctgggcagtacctcgtcttacctggtcctcaataaatgctacttgaattgaaccaaagagaataccaactcctccacttggttcatttagtaaatgaaatgaaatttctgttaatctcataggttcacaaaattgaaaagattggttgcacaacattgtcacctgctatttagatacataggaaaagaatagctaaattataccaggttttgtaccttctgaaaaaaaaagtcaaaggacggtaaattattttttccttacataaaatgaattcggtgcacatgaacatggttctgcttttgtattcttcagcttcctaaatatatgaggcccaattatacaccccatctgtatttgaacatttttagcatgcctcagaattagtgttgatttaatttatttccaccagagatttgcaaaatatttccttaagttattctgaaccggaggtgattcattcaaggagagagtgggtggtgtcttcagagtgggtgctccccactggagaaaactgagccaagtggggaggagatgggggcctctgggggcccttccctggcctgcccaccaccccttctggggtgtggcccagtgcacgcccttttcatgggtctgcactgctgatgggggagcacagctgaagctccctggttgggcacagatgcccttaatgaactggtccaggcttgttcaccctcatacctgacctgtccctttcatactcaccctacctacttgagactcctccagctcatcagggagctgcacaaatagggtctgtgcatggcaattgctggcttctcaggctggttggcatggcccctccctcgcagtgactggcaagcctcttgtttcctgggaagcctttctgtggctcactcttcaccccctgttccacccctgggaggacccttctctggggctccccagacacacactgtctctctgcctctgcccagagaccatggcttcctctccatgcaccagcaccactgctccttgaaaagaaaacagcatctctgtgcccactctttggactgactccatcgtattccagggcctatttgttaaactggatggaaaaccaaagcctgtagggctgtaatttattcattaatatcttaagttttcaagattaaacatatttactgggtagatgcttattaaatgcttgtgaatgaatggatgagtgagtgagtgaatgtataaattacgtgttgtcctttggtaaattttctagctttatgatataatcaaattatcctggctgcagcaagtctttaaaaagcccatatacttagagcaaaattaattgtattgttaaataaaattccccaagatgcaacaaagtgcagtgaagtatttttttttatcctgatatgtggaccagctaatgctgttaaatcagcattttaaatgtgtggttttattgggtctgatttcactgggttttatcataagatgaaccatttgcttttgaactgaattgaactgaaacctacagctattgggcccttatcataaaagtgtcaagtgccaccctggacactgttatgtacattatatcattgtgcagaccctggcccaggtgaggtcttatcctcactgccaccattggcatcattgtaattatcaacactctcaccatcatcaccaccaccagtatcaccaccaccaccaccaccaccaccatcagcaccatcaccaccatcaccatcaccaccactaccaccataatcaccaccaccaccatcaccatcaccaccatcaccatcaccaccaccaccaccatcaccaccatcaccaccatcaccatcaccaccaccaccaccaacatcaccaccaccaccaccatcaccatcaccaccactaccaccataatcaccaccaccaccaccaccgccaccatcaccaccacccccaccatcaccaccaccaccatcaccaccaccaccatcaccaccaccaccaccaccaccaccaccatcagcaccatcaccaccatcaccatcaccaccactaccaccataatcaccaccaccaccaccaccgccaccatcaccaccacccccaccatcaccaccaccaccatcaccaccaccacccccaccatcaccaccaccaacaccaccatcaccaccaccatcaccaccaccaccaccaccatcagcaccatcaccaccatcaccatcaccactaccaccataatcaccaccaccaccacccccaccatcaccaccaccaccaccaccaccaccaccatcagcaccatcaccaccatcaccaccatcaccatcaccaccactaccaccataatcaccgccaccacaaccaccaccatcaccaccaccaccaccatcaccaccaccaccaccaccatcaccaccaccaccaccaccaccaacaccaacaccaccatcaccaccaccatcaccaccaccaccaccaccatcaccaccaccaccaccaccaccaccaccatcaccaccaccaccaccaccaccaccatcaccaccaccaccaccatcaccaccaccaacaccaccatcaccatcaccaccaccattaccaccatcaccatcaccaccaccattgccatcaccaccatcacctccaccaccatcaccaccatcacctccaccaccatcaccaccatcacctccaccaccatcaccaccatcaccaccaccatcaccaccaccatcaacaccaccaccaccaccaccatcaccaccaccaccacccccatcaccaccaccaccaccaccgccatcaccaccaccaccaccaccaccaccatcaccaccaccaccaccaccatcaccaccaccaccaccaccatcaccgccatcaccaccaacaccgccatcaccaccaccaccgtcatcatcaccaccaccaccgtcaccaccaccatcaccaccatcactgtcaccaccaccatcaccaccatcaccatcaccaccatcaccgccaccaccaccattaccatcactgtagttatcaatactgtcactatcatcaccaccatcaataccatcaccaccaccatcagcatcagcatcagcatcagcatcagcatcagcatcagcatcagcatcaccagcggaacgactaacatgtactgagcactcacgccatgccaggcatcgttctaagcattttgcgtgtttttctcatgtaacactcactaaaccgcatgcaatgggcgattattatctccatgttacagatgaagaaattaagagaaggacaaattcagggacagctagtgagtgttggagacagaaatcaaataaagttcctcttattcattcattcaacaaacattttctgtttttttttttgtttgtttgtttttttttgtttgagacggagtctcactctgttgccgaggctggagtgcagtggtgtgatcttggctcactgcaacctttgcctcccgggttccagcaattctcctacctcagcctcctgagtagctgggaatacaggtgcctgccaccatgcctggctaattttttggatttttagtggggacattgtttcactgtgttagccaggatggtctctatctcctgacctcggggtccgcccacctcggcctcccaaagtgctgggattacaggcgtgagacaccgtgcccggcctcaacaaacattttctaagagggcctcctccgtatcaggcacatttccaggggctgggcgttgttgggctgagaagacattctggtgtgcgtgtgtgcgtgcgtgtgtatgtgcatgtgtgtgcctgtttgtgtgtgcatgcacatgcatgtggggcggggcagggacacagatagtgaagaataaatgaacagaaacaatttcgggtacatataagcaccatgaagaagttaaaacagggtgatggatagaaggtgatgatggagaaaggccatttgaggctggatgtccagggaagatcagagtaggtgtcatttgaaccaagaccagagaacaagggtgagatctggggatggagtttcagggaaagggatggtaagtgcccagctggtcagccttgctccagggacagaaagaggctagtgaatcttcagggtcctgagcaggggtgggggtggtgggaggtggtgaaagggggccaggccatgcaggttggagtttgggcttactccatgtaagatgggagggatttgaagcaggtgggtggcatgatcctgtgtaggttttgtaaggccatttgttctgctgagtggagaatggattgagtggggcaggaatggagatggggagaccagtctgaagttgcaggtgagagatgtggctggcctgactatggtggtggctgtggaatgagaggacgttagaagcacctgggacacttgtggaaatgacatagacaagaataacaaatcagttacacgtggagggtgcaggaaagggagggcccaggaccctggtgacagcccccaccaagtgcacttactgctcatgtgcattgcgtggagtcggccttgtgacagcccaggaaggtgggtgccattgtgatcaccatggaaacctaaggagggaactaaggcacggagagtgaaagccacccagctagaaggtatggagcgtgactcacaggcattccatgagtgtttgttgaacggataagtgagttcagggtggcatagctcacagctttgtgaatgggcacaagggcagggttgagctctctgaaagggtggcttcgttggactagaggcagacacagccacttaaatgagatcgtggtaagggtagattagtttggttggatttctgggcagatttattaaacacaccatttcccctggtgtaaaggtttacctcctcacttatttatttattttttttttgccagaggctcaattgatttttttcattgcagttattgatttctgaataacatttcgactttttttccccctgaatatctcttgtgttttagctaataaatctttgacatgttgcactggctctgtgggtggagggttatgggaagtgctgagatgcagactgagatgaagataccacttctcaagaagggctgccaggcaaggctttcagatttcctcctttgttttcaagctggagtgtttcagctttgctattgttctttcccaaccatgggaaaatccagcttcatgtacagtttgctgtctgagaagttcaagctgttttaaacactgcggttcaaacaatgatctgattatccttaagaatcaaatactgttagcagtggcaaatccgtgtgggtctgcagcaactcagtgctcacctcctaagaggaaaggattcgtctgaggggcaaaaggcagagtgagagactgaggcaagttttagagctggagtgaaagtttattaaaaagttttagagcaggaagagggccaagtgtgctgtttgacctatgacttggggttttatacgttggcatgcttctgggattttgtgcctctcttcccttgatttgttttttggggtgggctgtccatatgcgcagtggcctgccagcacttgggaggggctgcgtcttaatgtgtttactgaagttgtgcgtgtgctcattgagtcgtttttcccttaccagtggagttttcctagaaggtcatactccagttaaactccatcattttgcctcttagtgtgcatgtttgagcccactcgcccaactcagatcctgtcaggaagctgctggtcatcaccttcaggtgtttcttttttctttttctttttcttttttttgagatggagtctcactccgtcgccagggctggagtgcagtggcacgatcttggctcactgcaagctctgtctcccgggttcaagcaattctcttgcctcagcctcccgagtagctgggattacaggcacccgccactatgcccagctaatttttttttgtatttttagtagagacagggtttcaccatgttggccagtctggtctcaaactcctgacctcgtgattcgcccacctcggcctcccaaagtgctgggattacaggcgtgagccaccgcacctggcccccagcttcagctgtttctattgggagactgcctttccctgatgccagctgtaaccaattattattttagagagaccgtttaataaccgcctgaccatcacctgatggtcacctgacattcctcatttggggcaggctctcctgccctgctcagttctgcctaactacctactctaacaatactatgtagttgtttatttttatttttagagactggggtcttactatgtagcctaggctggcctgaaactcctgggctccagcgatcctcctgagtacctgagaccacgggcatgtgtcactgtgctcagcatcaaatgctacatcattgttttttgctctacagctcatcctaaatttgatttgtcgtctaaggattttcagagctgaaaggtatttcagcaatcatgttcaaccctcccatttcatagatgaggaaattaaattctaaggaagaaacatgatttacccagagggtcagagctgatcttgaaggagactggtttagtgaagacatgaggagtgggcaattgaatcttatgtagtgtattagttagctattgctgtataacaaaccaccccaaaattcagtggcttaaaacaaccattgatttgctcaagagtttgtgatctgggccaggcttagctagtggttcttctgctggtctcacctgaggctacttagtgacttttagcagtcatctggaagctcacctgggcctgggtcatccaaggtgcctcagctgagctggttagaacagctggaggctggctcggcctctcactccacacatagagagtctagtagggtagcccaccttctttacagggtagcccagggctgccagagggcaagagtggaaactgcacggactgttaagtcacacagtaacttccatctcttcctattgctcaaggctttcctgcgacgttgctgcagcatcagtacatttgcccaaggccttgatgttcccaatgttgcatgtagtcagaggcaggaaggtcttccgagatcacccaggccaaaccttttagtttatagctggggaaactgaggctcaggcctcatccttgagcacctgtgcttttgttcccagctgcagcttgacattctgttagatgtctacaccaggcattgcaaacttaacatgactgagatggaactttggaattttctcttcagccctcttcctcactggcattcccactgtcctggctggtctttcctatcttagttctgcaggcccgacacctaggagtcatccttgatcctcctcctaggatgtctgaggctgcatcataagaagccatggagcttccatccggtgatctggtgatctgggtcttttgagtttgctcttaagatgctcatcctgggggaaccagcagtcatggtgtgagaatggcaacccacatgggaggccatatgttgacagccccaagtgaactcccagctgatggccagcatcgaccaccagacatgtgaaagagccatcttggacatccagcccagttgggccttcagatgagtgcagcccccactgctgtctgcaacttcatgaggaacaccaagaaggaacagctcagctaagcccagtcagtctgcccaaccactatagcagatggtaatgaattgttttaaggggctgtttgttacacaacagtaggtaactggaacacctactcagaatctttgctttcctatctcctgtgtcctgaaagttctttccctggatattttcatgactgagcccttctcattgattgctctttgaagtcacttctcagagaggcctcttgtgacctcagagttggtttagttttgtggctgtgtcctgtttccatgtgaataagatctgttgtggaatgttggcatagctgtgttccacgtgacgtttgttttctgtctaaatgccaaaatcataatacagagacccacgtaaacttacatgatttaataatttttaattgaggtagctatgttccgtaaagtgtacagatcttacgtgttcaatttgatgagttttgacaaacatgtaaccattacacaaaatagatattggaagtttttatcacctcagaaaaaaatcccttgctcctctttcaatcagttgtccattatcttcccagcaccacacctgaagagccaattatttctgcttgctgaagagccaacacattattttagaaggtcatgtgagtaggatcatgtggtgtgtactcttgtgtttggcttcttttgcccagcatgcctatgaaattcatccacattgttgcagtaagcagtatttcattcttggattttattttttatttttttaattaaaaaaaatgtttttgagagggagtctcactctgtcacccaggctggattgcagtagcatgatctcagctcactaaaacctccacctcctgggttcaagcaattctcatgcctcagcctcctgagtagctgggattacaagcgtgtaccaccacgcccagctaatttttgtatttttagtagagacaaggtttcaccatgttggccaggctggtcttgaactcctgacctcaagtgatccacccaccttggcctcccaaagtggtgggatgacaggcgtgagccaccacagctggccttattcttggatttataaaaattgcattttaatttatctatgagcttttaaatctctatctctgcattatgtttttaatggttgctctgggattatactatacatccttaacttttcattactatgaaaagtttattaattttccaccactttacataaagcataacaataggtacctgtacttcctccttcatccttttgctatggctatcgaatggattatattgatatatactataaacctcacaatacaatgtaatgatttttgctttaaataattatatgtattgaatggtcttttatgtttacccacatgtttaccatttccagtgttcttcattgcttcctgaaaatctgtgtttccattctgaagaacttcctttggcattctttgtagtgcaagtgtgctggcaatgaatccctttagtttttttaaatctgaaaatgtctttacttcatcttcataattgaaggatattttcactgaatataatattctggattgacaggcttttttttttccaagcactttaaagatgtcatcccaccgccttctggcctccatagtttctgatgagaagtcagtagtggatcaagtcattgttcttttgtttgtaatgtgtcatttttctccggcttctttccagagtttttctttatacttggtttttagtagtttaactatgacgtgcctttatgtggttttctttgtgtttttttccctgcttgagattcgctgaacttcttggatctggaaatgtatgtgtttcacaaaaattggggtcattttcagccattgttatacttttgtgcctcgttcttttgtcaccttctttgacaacagtcacactcatgggagactgtttggtgtttggcccacaggttcctgaggctgggttattattttaacttccctcctctgtttttcagatagagtaaaaattctgtcgatctcccttcactttcactgactcttctggaatttgttatctgctttttagtatatccagtgaatttttaaaatttcaggtagtgtatttttcagttctagattttccatttaatttattatttagtagtttctatttctttgctgagactacttatttttaaattcattatgattttattttcctttacattcttaagcatagtacaaatagctgctttaaaatgattgtctgccaattccagcatttggggtccatctcagttgattttttttttcttttgggttttatttattcttacatcaattaattttgatttgtaccctgaatttttgagcagtacattgtagacactctgggttctattatgttactcccaagagtattgtttttttgttataggcagttaagttggctgtactcagactgtaaaatgtcccccttgcagaaggtagcagctaaatcctccatttaattcttttagcctttggtggactgtttgacatctgtcctgagaagacagagatctgggttgacttcatacatgggacttggtgctcctcatctttcttcctcctcattccctgccagattccagtagccaagattgccccacatgctgtcagctacttcttaaggccactaagatgggagatttctatcacagttgtagctctctgaatggtgcaggaggaggactgctctcaggccaactgccacaaagcatgaaacatttggtgcttttcccttcttacatgagttggcccctccagtacccacctgcttttgattgcccttaggtgccttaggtggttactttttatattttgtccagagttcatggttgttatttgtgggagggttggtctgataggacctactttgcatttcttagcattgctagaagcagaattctcagtttttgtttttttttttttaattgccaagtagtattccactgttatgtctatgcagtgtacttgtccattcttttgctgatggatgtttaggtttgcttacaggtttttgtctgttaggaatgaagttgccataaacattatgcataagtctgtatggacataagtttttttctcttgggtcagtgtctgggacttcacacaaaactgtcaaattggttatttatggggtctcccatgagcctgtaaataggggatacaagggctaccgttcacagggaatactgtcatgaacaaaacacatacagtaaatagaaacaggtcccattggtgtcacctatactatgctagcagatgctgagtgtcagggagaaaaagaaggccaagaaaagtgatgggaggggaggcaactgggcaatgggcttctactgaaaactggctgggcaggggaggctttgctaagaaggaatatcaagggactccagggtggtggctgagtgaatgtgtgcatatctgagcaacaacattttaggcagagggaacagtggctgcaaaggccctgaggtgtggctggagtggggtgggctgaggaagggaggaggtcatgaggtccgaggagtgctggggcaggccatgggtggatgacctggggtccctgggccactgtgtggaatctgggtttgctgcagtggacaggaagctgttaaagtctgcagcagtggcatggattggaagatttggacattagtttaaggagagttgctctggacaggtgttgagaacagacagcagtgaggaagggctgagaagtgggagccagtgaagacgcttctggaatgtgcagcccagggtgacagcagtatagcagaggggaggggtgcaggtggcaatagcggccgggtctgggatactgtttgaaggcagagccagggcattagatgtgggtgtgagagaaagaggcatccaggacatctccaaggtttttcggctccagtgactggaggcctgaaaattagaatagtgcaaatgttgggtattgctcggataaaatgaaaatagaccctcattggaaggagggggtcaggaagtgtgcaaagtccctctatcctattaccctgcctggtcttttccagggtatctggaactgattgattgattgactaattgtctttctagccccctagaagaaatgccaggacctagcacaggttgggtgtggcatgtgtgggaactcaataaatgttatggaataaaaggaaggaaaaaggaaggaaggaaggaagcagggaaggagggagggagagagggagagagggaaaaagggagggacagagggagggcaggaagaagggaaggagggcaggggagggactcacccggggctgaggccacaccacagtcaccatccttcagacaccctgcctgtgtttgcttgttcagtccacacagctgcaccgtacatcacagaccagaggggagattcgcttgtttcttttaaggtgaagtcccagaggatttccccggcatatggaaagcccctgtggacttcaagttaggctcagttgtggcttggcttgacggtccccagtgaccaagaagcatagctcccgaaggtgggactcatttaccccaccctgaggggctctgatcacagatatgcttattcttacatggaaaagaaacacattgcatccattcgtcctcatcccctagaaacccactccctatcctgctccagatcgcgtggaacaggctggttcctagtgctgtttggtggccctttagacacctgaggacagagacatgcccctgggcatcttttttccagaccaaatcctcttccatctccaattcttcatttatttgttcagcaaatgctttctaagcacctgctatgtgctgggctttctgctgagctctgggaccaaaaagacaaagatactgggtctctctccttatgggacctgtcataggccattgtttggaccaggtgctccatctgtcctctggaggctgaggtcctcgtggttgagagagcagactgagggccagcagggccaggtagagagtgagtatctggaaggccaggccaccctaagccatggcttcttcgtctgtaaaatgggccaacacgcatgccttcctcatgggacaaggacctcctttcccccattgcttccttctctagatgctagcccagtgtcaacccactgaatgaatgaatgaatgaatgaatgaatgaaagtgttacaaggattaatggtgctaatgtgcatcaacctctaagtgcccatgagattctcctccctgggggatttccgaaggggcatggtcccccagctgacccatcccagtcaatcttgagaactgggctgggaaactcggagggtctccgtcagcattttctggattgagagggggtgtgatttcagcccccattcctgtattcttggtatctgctccatccctgatgcagatgaggcttgtctgttcacagggtgcaccctgtgccagcccatcaggtcccactatcagagtggttcccaggcctgatgggtgattgcctcatctgtttccagtgtctgccaattacattttatggcagcagctgggttagatgtgcagcaatcggaaaacagcatcctaggcacagagcaaatgcagagtttgggcttacatttgtcacaaaacagcatcccagatcactgaataatttatagttaattattccaacttaaaaaagccttggatcacaatgattctctcttcccccagagttgcgggatctgtttgggcagcttgcctggctgtgtggcagcaggcaggcattctgccgtcttgcccagagaggcttcctgctccctgcctctcctgtgtggatgtgtgccgtgcgacggcttcgcagccctgtggttaatgtggccactcttcccgtgtcagcttttattatcatgaacacccagctccctcagggccctgcagggttttagataattcctcagattagagcaatttgtccccagcttcagggtgtttgaaccgttaatcctggggcacctacagggtatgtaccatgcaaggcccttgggctatttgtcatttggggtccagggccccggatgcaccccaggacttggctcaaatgaacccccctctttccttcctggtcacacacaaccatgaaagcaggttctttggcaatgtcctgggtccctcctgggatgactctggccaaggtgggggtcccctgtgatgggccccttccaaatgatggtaggtccaaggccgacagcttggagtggatgagatcaaatagggttagggtgactcctgtcttctcatcttcacccttctagaataccttctgctggccgggtgcaatggctcacgcctgtaatcccagcactttaggaggccaaggcaggcagatcatctgaggtcaggagttcgagaccagcctggccaacgtggtgaaaccccatctctactaaaaatacaaagatcatctgggtatggtggtgtgcgcctataatcccagctactcggaaggctgagacaagagaatcgcttgaactcgggaggtggaggttgcagtgagccgagatcacgccattacactccagcctgggcaacaagagtgagactctgtctcaaaaataaataaataaataaaataccttctgccactgcaatcttaattcatttcatgttgattaaggacctggtgttgttaggaacaaacatttctagcctggggacacagtggtgaaaaaagccagaagtttcctcctcctgaagctcacaactagtgggagcaggcagaaatacatggatcaacaaataattcctgtgtctaatcactggtggtgtaaaaacttggaagaagaaaggggaaggaagcctggaaggaggaaggagagtggcttggtggggaggggcatacccttgcattgggtggtcagtggagaaagggaccttgggcgcaggcagctgaatgaagtaaggagggagcccagcaggtgtctggggtaggagttgttttttttttttttatggttcaatggtccattctgtttattcagaacagtaagataaatataccttaaatattacaaatttttatatacagaaatgaccactccgcagcaagtttgaaaagacaaaaaaaatcatctcctcctgctttataaaaccctagatgacccattaggcagaactgagcccttgatgcattttcgtcagcacactttggccaacattggagggaaggacaagaatgtgggaggaaaacatcacattgaaaatccctttccaatgagggtgccaagcgtctggtcttgaaggaagtaccctgcctaggcaggtgtgaaggtccagaggtaggactgtgtgtggcctgtcggaggcactgcgagaggactcatgcagccgaagggagagaaggatggggtggggtgaggctgaagggggcagggttgcgctccacagtgctccagaatgtacttcatgcctatctgattccctcaatatttcctgagccagacacctgggaggactggagatgggtgagtcagtccttcccctgggctgctcatagttgggttttttgtttagtcactcaacacacccaagcactgaatggatgaaggagtcccagctcctgaggtccccagcctagtgagggcacctgaaagcaggagtagccgcctggtttgcttttcccctcccaatctgccttgggcaccacgtcctggccacttttgcctgccagactggctgtgtggtccgctttgccctgagctgtctaacttgggtatgtctcccaagttagatgaagttccagagggagagggagagggacggggagagaggagagagaggggagagggagaagaatatgatactgtctagctgccttttctgtcaccaaaaagatcagaggtgtagattcagggacccccatttcaataccagccccatcaagaaacatggcaatgttcaaggcttgagaagagtccttttccccattgatgactgtttgagtcactcatgtccccgtgcaggccctagcacagcccgggagctcactgggctcagtgggtgggtttgccgtctgggtgagtgaactgttgctccccaacgtcaccgtgcatagacaccagctcctccaccttggagctcgcactgcagggtgtcacctcccatggtcccctttccaaactgctgaccctcattagtattcacggcacacccaatgaattatctccaccccattgctatttttttaatccttgatactttaaatttctatttttatgcatttaaaattatgaaatatttgatacatacaacagactgtatcatcatttgtgtaggttgtggagcatggtaataaattgcagcatctgtggatccgtgcttagcattgagcctactattctctgagtttctccctgcccatgaaagtaaccactgtcctaatattaattccaccattgcctggttttaagttgcatcacaaagatataggcttaaaccatctagtgttgagctgcgcaaagattttggatttttatataatggaacatgctgtgtgtgttcttcaggaacctggcttccttcatttcgtattccttgtcgatgtgtgtagggtgatgtgctaatttctatggctgtgccctgttcccttatttgcacgatcgtgtctcccaagatttggactctaagagtttcactagggtgtttactggagagaaattgctggggtttgggtgtgcacgtcagctttactgtatgtactggcaccaaagccaacagcgtatggatgctgtaagtcctcgccagctctccacattcgcaggcttttagattttgccaatctggtgactgctaatggtctctcatgtgattttaatttccatttccctgcagagcctttcatatgttttaaggcacttctcatgacctcttctagaaaacactgttccctgatttgtgcaaaccctctttttgggtcctttgacttcttgttgccatcttgaagggccttgtgtactttctctgttaatcattgttcattttagctgtggcaaatgcattctccctgcatgtagcttgtcttttcgctttatgatgattttaatgtagcagaaggcaatgctctgttgatggtttgtactttgggcttgctgaagaagtcttatcctagcccagggttataataacaagttttctataatgtcttgcacaagtttttcagttttgcttttcatggttaaatctttagtttacttagtatttatttttgtctagggtttgaggtagggattttaatttttttttcttttccaaaaggaaaacaatctcccagcaccaccgagtaaatggtttacctgttcccactggtctggaacatcctctctgtactctgccatttcctgatatgcacagtgtggattccattttgttctgtgggcctgtttgtctgtccttgcaccaatatcacacggccttaagtattgtgacaaccttgctatctggtagggcacgttttccccacttccctgccacctccatctatttctcttctgaaaataagtagctggccactcttcctcttgcacccatgatcacaccctgctgctgggtgtcctgccggtgctcatggtgctgtttcctcagttggggtgcctcctccctcttttccctgaatgactgctgctcaggtgtggactcagatcaagcattgtccccttaaaggcctatggaacttctccatccctcaggaagagagggcagttgttgtttggcacagtctatggatcacgctcttatacctgccctgctatttactatggccctcccacccccgtccatacgtatggcatcgtcacactccctgtgtccatcacagactttatttatttatttatttatttatttatttatttattttgagatggagttttgctcttgttgcccaggctggagtgcagtggcgcaatctcggctcactgcaacctccaccttccgggctcaagtgattctcatgcctcagcctcccaagtagctgggattacaggcatgcaccaccacacctggctaattttttgtatttagtagagatagggtttcaccatgttggtcagggtggtcttgaactcctgacttcaggtgatccactcgcctcagcctctcaaaatgttgggattacaggcgtgagccactgtgtccagcctatcacagactttaacgcacagaaggtgcctagggaatatccatgattccaaatggactcacacctagacttggctcttcttcccctaacatggcccttccctcctcccttcatcacatgttgattgtaggtgggtgttcactggaaatgcaaggatgggtgtccaagcaaagcctctgttgcgtccatttcacagatcagctctcagtaaatcccatcctcagaggcctgggctggtggggtccagatgggatgattctttggtctgattattttcacactatgaatgtgtttctttcaaagttaggattttctttccataaatagagggctgaactttgcccccccgcaaaatatgtccaagatctaatttgcagtaactgtgaatgtgacacatttggaaataagagtctttgcagaagtaattaaataagatctcaagacgagattgtcctggttttgctctctggtaactggtcctaaatcccatgactggtgttctcataagagaaaagagaggggggttagggagatacagaggaggaggcagagactggggtgatgtgttcacaagccaaggggcaccaaggagtgccgccatggagagccgggagggggccctgggacagagtctccctgaagcttctggaaggcactggccctgccaacattttgattttagccctctaagatgcatccagaactgtgagaggacatgtttctgttgttttaagccacagactttgtggtaatttataatggcagcctgggaactcatacaccacgcaaaagttatccagcaggagaaactcggaagggccagccgaagagcctcctctccctcccggcagcagttctgtttcaaagcgccttggcatcttttagctgattttcaccacatcccctggaggaaggctcagtgacctactatctccatttccaggtggagaaagtatcctcacctcactgtcaccctcgtgcaatgttgctttctcttggaatcactgccagagcatgggatgaacccagacctgatcccgtgcctgttccctcaccaggaggacatagagtgtgggggcgggcagggacatggctcatcccaggtgggatccggcagctgtcacactcatccccaggttgcgagcccctctgcatgccaggtactgtgccaggcaccggtgatctgggagtgcccgggacactgttttcgtgggtgctggtctgcatgggccccaggcctgccccagctgctgtgttctggggccaactgtccttccagcctcctcgatagccatatggcattccctgtgccgacgatggcttgatgtcacttgggtggacccaggtgtggcagacatgcgagtggcagagtggaccaggctgtgtggccctgatactcaccccacactgtggctctcagcctgaggacttcatgctggctgtggaggccacgtagccccttggcagggcaggctggatgggtaggagaggcagggccctcagctgtgggatggggtgttggcaggctgtgcccaccagcttgttggcctccccaagttgctcttcctccagcaacctcgctgcgtggacagcttcccctgtcacagggacagcagagtcctcccaacagtatgttcctgggccaggccaccaccatcctggtctcagggcagcctctggacagggcagccaggagagttctctgaataaaacccttttactcaggtttccccttgcttccaccctggcagcagcagctgggtgcagttgcatgagcgttggccccaggctctccagccacactccaggaagggccaagtatggccttctcccttcccatgcatccctgacctgtgtcccaggatgcctgtctgccctgctcccagctgatgcctccctgtgcccggggctcccacctggacggcgtgccgcgtgtgcttggtgccctgggtgcttgctggcctccacctgggctgtgagtgtctgagttaggggctgggtttgtgtcactccctcttgtattctgggcatctggcacccgtgtggtccaggtggccctccgtctcggagaccagtgcttcggtgttacattcagctccttgccccagtaggatgcaagctctttgagggcaaggcctggcatgcgggaggtgctgtgttcctgtctgttgaataagtgaatgaatgattgaatgtgttagagggtccaatgtggggagagtgagggattcccctggacaccccggggagggccttcacacccatattaacccacccagcggaccaggttgacggcgatttggggacctatggtaaggaaccaggatctcctgcgtcccctgtgtttctagatactgcagggctggtatgggccccctggctgtagggctgagacggaggcattcaggctagaccaatgggtcctgccccagccgtgtcagcagagcctgcctgatcctgtccctgggtgttggccagagtgccaagaaagcacaaaagactcaggcggaaaaatcagacagaccctaaggtggtttaaaaaatgtgcaaacccaggtacgctgcaggctcgaagctgggtgtagccgaggcgtggggcaaatgagcatgtttggattaaaaaaggccaacgcatctaacagccaggaaggtttgctttaacattccagcatgttctgttgatttatggctgttgctaggtaacagaatacaccgaggctgtgtgattttaaagctacggctcccgactaaagagtcgacagaaagagaaaaccattaatcagggtgggggctgggcgtggatttaaatgcaaaccagaagacagggaactgttgggagcaatgagggcgaagccaggtccacccctccgtgtctgccgtccttcaagggtgtgttccgctgcgggtgtggagagctggctacagacacgggcttctccttcaggaaggcactggcataaatttatctttcattttgcactagatcgatctagtatgtgtcagatttctaacacagcactgttagtgtaccagatgtacggagtgtgtcatcttgatgggcaggatgcattgtgccatttttatgttgcacacaactcccacctctccccagcaccatgcctttgctaagctgtgctgctacctcctgtgtggcctgcttgggataggacagtgaaaaagacagaagcccccagactctcctccatgtccacacgccccccaccccagctccctgaagctgacattctgattgagggagacagacaatagtcctgataaacaacgaattttaaagcaaagcccagaaagggggaccaggaggggtgtgtgtatgtgcgcgcgcgtgcgtgtgtgcttgtgtgtgggtgggtggatggcaggcgtgctggttgcaattgcaggtagggggaacctggttggcctcattaggaaggtgacatttgagtcaagtcttgtgcaaagtgaggggccgaggcttgcaggtatctgagggaagaatggcccaggggaggaaatagcagatgcaaagtccccgaggcagggtatgcatgttgagctggaggaacagctgggaggttggtgtgttggaatggagtgaggagggagactggggaggggaagcagatcctatagggtccccaggccactgggaggacatcattgtcttggcaggtcagaatcctaaccctgaagttcagtcccatacctggggcccatgcctttgacaggcctccctcctgccaaaggctggcttgctccttttggagcggtatgcacctgtgtcattgctgtgtgttctccaaaccccaggtctcctctctgtggtgtctcttagtttgcattccatgaaagtagtgcctgagcctggcatgtgggtgcaggcagtttatttgggatgagatcctagggcacatcattcgagtccctgctgtagggatgagggctccagtctactgagaattatacagagggctccagaactgatctctaaaaaacagcagtagttctccagggattatcagttcagatgggtggggggttggcgtggggccactgactttcactcacacttgagcatgcgctccaggcccagtggtgtgggcagaggccttggagtggaatgcagaaagacgccagagcactcggggggaggctcttatagcatcccctaccccatcaagtcttcagcaccacgaccctggacaggctgaagaccagacctccctgtctgtggggttggccatgggtaggcaggggccccggctgaccctgttggagtccatcctgggtttttggattgcagtgggtggtgataccttctctggctctggccaaggcactgtgggacatgtccttggagctgctactggctgtgtccaccccatgagagaaacagagaggagaggcagagagggtcccatggagtttaagccccagggcccactgtcagggcctggaattgtgtccccttttttgctaagctaatttaggctggctttttgtcacttgcaatcagaggatcctgattaagcctccttattgtccctggtgttaccggtccctggaggacagtagtttactcaggccctgcagcagagccagtggatggagcccggctgtattagtctgttctcgcattgctataaggaactacctgagactgggtaatttattaagaaaataggtttaattgactcacaattctgcaggctgtacaggaaatatgggtagtaagcttccctcaggaagcttataatcgtggcagaaagccaaggggaagtaggcacatattcacatggccagcaggagagagagagagaagggggaagtgccgtatgcctctaaacaaccagatctcatgagaactcactcagcatcaccagaacagcaagggagaagtctgcccgcatgatccaatcacttcccaccaggcccctcctccaacattgaggattgcaatttgacatgagacttgggtggggacatagagccaacttatatcactggcccagttccagcctggccccctccagagacctgccccatgatggcctggccttgccaccctcctgtttgaaccaatcatcacttctttggttctcaaggccttgtgggttctgatagccccactggactcaaccctctggttccccaagggaatacctggactggttccaccaccctacatggccccctggcttggcccaccatgacataccccagtagcctgccccatcttccatgcagaagctcattggccagcctgtgccaccatcatgcaggaggcacagagatgttggggaggggcaggatgaggggctgaccacctgagccacttactggcctccttgatcatccattcatccacaaattcacccaacaatacaaattcctgccacacaccaggcactagggtacacaacacagtgagcaaaacaggcaaaaatccctgtccacagagatgacattacagtgggggaaatgggataaaacagatctgtgagtgacacagagcagggccctggagcattggggctgtggcagagggtttacgtggggtggtgccccgcgttcaggagaggtctggggcacagctctgcagccaggcctcctggcgtcaggtcttatccactgctcatgtgtgacctggctgaggttgcttaacctctttaagcctcagttttcccatctgtgaaagggagacactaagagtccctacccacagggtgtgtggaagtggagtgaaatcctgcttgaggagtgtttgcccagggtgcggcatgggagcggggctgcaacctcggcttctcgccatggctgatgttccttttcagaatatcttgagagatgcagagcttccctaacactgtgccctgatgcgtccgctctccctggagtggtgagacagcatgggtcttcctccccacctcactctaggggatgtggctgatgtggtttgcagtcatgtttccccattcctctgtcccacctgtcccatctggttcccctgtccatctgtttctcaggactgtggcttcctggagccctcaaggcacgattgggtgctgttcattggtttctgctccagtatgtcctgtagtcctgatatttaatttgtgagcaatcatttttaaaattaatgaatagttaataactgtggtatggacttaatgatgactcgaagcacagaagtaatcaaggaaggctccatgaaggaagtgtcatgagaggatggcttggaaatgccagtgggaaagatgaatgccatctccctgctgaaggctgggtagagttcattccctgcagtccctttatagatggaggacataagtcccagatgagcgctcccaggaacctgcccacaaaaggcttggagtcttgttttcctgacatggccaggcccaggtgggaggtggggatgagcatcaggcctttgggcacctcttgaaagggctgaaccagctggtgggagggacggatgcctgggggctgcacacatggctggcaagtgctgtgaattattgatcactagagagcaatgtgcaggcggaggtcattttcctcctgggccaaactgctcgatcatgcttaattgcctgttttccaaatttccccaaggctggcctaggggagggattagctctatgcccatttatttttcttgaatccagtgtatggggtaaaaagttacaccatccatttctctttggtattaagttcgaaaatagtggatgcaattaattcaggtggtaacaggtggtttcctgtcctacctggtatggcaaagaggtgcttctctgtgaatctcaatccccacaagactcggctcacttgttgagtagtggactggcagaatctgaaaaagttaagggcaatagagactccctgagcacccatgatgtgccaggcgctaggtatatcagtgccttcaattctcactgagataaccaaataaaataaatatgacacattaaagtgaggaattagttgaagaagtattttcaaagaaaattgtcaaaagtttgttgcaaggatgctcccactctttactgacaggcagggtatgaaagggttgaggggtgcataataaaaggagttttgtggagcatactgctttggagagggctatgctgggaatcccatctctgcatgaggaggaataggaggtacctgccacttacctgaagcccgatgtggagggagggttcagggcttaaaatggagctgctaggcttctggccaaaatggaataacagggaccagacttagcttctcaccttaaacaagtaaaaaaaatggcatgaaacaaatgaaacagggattttcaagcaattggacatcagacatgaaagtgatcattgaatgatgggaaataaacaaggtgaggccaaggactgctccagcttactgccttgagagattcctggccacgttgcagggagaggttgcccactggagtctgctggaacccccgagttgaaagaatgagctgagtctggggagatcaaagtggctggatttcacaggcagactaatggaatggagagagctgcaaagaaagacagctctggagttatgcagaagtccaacttgagtgctcagttgagtaatgatcagcacatgcatgcaaggaaattacacagtcagggaaagaacccccaaaaggacctgtgataccagtacttagagcacgcacacagtcaggagtagtgcctgctcttaccagccagactggaaaatcttgtaattcacaggaaattgggtagacaactcaggaaagtcttgcctcagtaggaggaaattattagtcctagattgataatttctgcaagcatccttagcaaatcatcaaagcaaaacttttgaaagggtgaaactgtttcatttttgtttttttagacagggttttgctctgtcacccaggctagagtgcagtggtgtaatcatggctcacagcagccttgatctcccaagttcaagccatcctcctgcttcagcctcctgagtagctgggactacatgcacatgccaccatgcctggccaatttttccattttttgtagagacaggttctcactatggtgcctaggttggtcttgaactcctgggctcaagtgatcctcccaccttagcttcccaaagtggtagaattagaggcatgagtctccatgcctggccaggatcaaactgtttataaatgtgttgactacatctcagaacaaggctcaggaatatttataggaatacaaacaaatccagcaccctaaaaggcaaaaatcacaaagtctggcatccagtaaaaaattactagccatgcaatgaagcaggaaaatgcaaatcataatgaaggaaaagtcaatcagttaagactgatccagaattgacacagatgttaaaattagcagacaaggtcatcaaaacacttattataatcatgttctgtatgttctaaaagctagaggaaagattggacatacaatcaacatggaggatatagaaaagacataaatcaaactactacagatgaaaattacaatgtataatatgaaaaacacactggataggattaacagcagagaggacattgcagaacaaaagattagctaacttgaagacagcaatagaaactatccaaaaagaaatatagagagtaaaaagataaaaaaagaacaaaaattttaaaaagaaacagagactttctcattgagttgagacaactttaagaggcgtaatatatgtataactggggtttctgaaagagaggagaggaagggacagaaaaatatctgaagaaataatggctggcaaatttccaaatttgatgaacatggtacacccacagatacaagaatttcattgccccacaagcacaataaaaatgggaaaaaaccacactaaggcacattataattaaattgcccaaaataataaagagaaaatcttaaagtagccagagaaaggcgtggggtggggaaaacatgttatatacaaagcagcaaagatatggattacagcagatttctctagaaaataatgcaagtgagaatgcagtggaacaatatcctcaaagcatgaaattaaaaaaaagtagtcaaactagagttcatacccagaaaataatctttcaagaataaaagcaaaatagacttctgagacataacggcttaaagaattcataactagcaggcctgtagtacaagaaatgttaaaggatgtgcttcaaacagaatgaaagtgatactagatggaaatatggatctatgcaaaggatcaaagagcagagtagtaactacataggtcggatatgatattttctcttattattttaatctctttaaagtataattggctcttgacacaaaataataaccatgtagtgtgaggtttataacatatataaaagtaaactgtataatagcaaaaaggctgagaggggagaatagaagtatactattataagtaagtataagtatcttaatctatatttgacatgctataatatcacctgaaggtagactgtgataagttaaagatgtatactgtaaaccttaaaataactactaaaacaataagagttgtaactaagaagccagaaagtagatagaatggaataattgaacaatgcttaattaatcccaaagaagacagaaaaggagaaagaagggaacaaaggaaaatggaataaatggaaaatgaatatcaagatgagagatataaacctaatcataccaataatcactttgagcagccatggtctaaatatcccaataaaaagacatcagatcagatgaaaaggcaagacccaaatatatgctgcctacatgcaacccacttgaaatataaagacaagagttaaaagtaaaacaatgaaaaagatatattgcgttaactaacactaatcaaaggaaagctgcagtggctatattaatctcaaagtagatctcacagtaaagaatattaccaggttaaataaagtaatttcataatgataaagggaacaattaattaaaagttaatgcttatgcacctaatcagagacatgaagcaaaaatgatagaactgcaagaagcaatagatgaatctacaattatagttggaggtttcaataaccttctcttactaattgatgaaacatgtaaacaaaaaaatgtgtaagaaaatagaagatatgaacaacactatcaacaaactggacctggcttatatctgtagaacatgctacccaacaacagcagaatagatgttcaagtacacaccaccgaacattcatcaaaataggccatattctggccacgaaacaagtctcaataaatgtaaagggactcaagtcacaaaaagtatgttctgtcataatagaattaaattagaaatcagtaacagaaagagctctggaaaatctccaaatatttggaaacaatgaaacacacttttatataacccatgtgtccaagaaagggaaattagaaagtatttttacgtgaatgaatatgaaaacacagtgtatcaaaatctatgagatgtcgctaaaaccatacttagagggaaatttacagcactaaacatgtatattggaatagaaggaagttcctaatcaatggccttgagttccaccttaagaaactaggaaaagaagagcaaattaaacccaaagtaagcagaagagaggaaatagtaaggaccagaagagaaattggctaaatataaaataaaaacaatagagaaaataaattaatccaaaagttggttatttattggttaaaaagttatctaagatttttatcagtaaaatcgataaacctcttgccagactgaccaggacaataagagagaagataaaattgccagtatcaagaatgagaaggtgacattagtatatattcagcagtcattaaaataacaataagggaagataatgaacaactttttgctaataaattcaacaacttagagggaatggttaaattcctggaaagacacaaattaccaaagcttactgaagaagaaatagatatcctgagtagtcctataactattgagtaaattgaatttacaatttaaaacctttccacaaagaaaactccaggcccagatgacgttactgatgactttcagtaaacatttaaggaggaaataatactaattctacataaactcttccaaaaacttgagaacactttccaaatcattctgtggggcagagttaccttgatctcaaaaccagacagacattatgaaaaaattcgtgtcctcatgtacatgaattaaaaaattattagcaaattcaatctaacaatacacaaaaaggataatacatcatagccaagtgggtttatcccaggaatgcatggtaggtttaactttcaaaaattatcaatgtaatttaccatattaacaatttataaaaacctatgctatcatctcaataaacacaaaaaggatttgacaaaaccaacctttattcttgataaaattgataaaatctgtcaggaaactaggaatagaagtgaagttcctctacttgataaagagcatctatgagaaaaacctacaggctaaatgaaagattgaatgctttctccctaagactgggagaaggcaaaaatgtctactctcagcacacattcttctcgacgttatagctagtgcaataaagcaagaaagagaaaaaaagatgttcagattagaaaagaagaagtaaaactgtctttattcacagatgacatgattatttatgtagaaaatccaaaggtatctacaaaaaagctaccagagttaataaatgagtttaacaagtttgcaaggcacaagctcaatcagaatagaagcttaaaaactaccagttatgatatgaggtaggaaggaatacatctgataaaagacatgaaagacttatgcactgaaaattataaaacactgatgatagaaattaaagaagacctaaatgagtggagagatatactatgggagtggattggaagactcaatattgttaagatggcagttccccccaaattgatctgaaattcaacacagtgtaaacaatatctgaacaggttttttttttttaagaaactgaaaaactcattctaaaattcatatagaaatacaaaggacctaggatagccaaaacaactttgaaatagaagaacgaagttggaggactaacacgatctgatttcaagatttattataaagcttcagtaatttatacaagtgatactggtgtcaagatagattaacagatcaagggaatgcaatacagagtccagaaatagatgcatgcatatatggcagctgacatagctgattttgaatagagactcaaatgcactttagtggagaatatttagataatgggtgctaaaacaattgtatatgtgtagaaaatgaacttcaatccatattttgtaccatatacaaatattcaaaatggatcatagatctcaatataaaccctaaatctataaaacttctagaagaggaggtgaagaattttttcttaaaggaccagatagtaagtattttaggcttgtaggccatatggactctgttgtaatgatagaactctgctattgtagtatgaaagaagccatagaaaatacatgaatagatatggctgtattttagtaaaactttgtatataaaaatacgcagctggtctgcaagctgtagtttaccaatccctgttgttgaagaaaacagagtaaaaacctttgtgaccttcagttagtcaaaaatatcttagatatgacactgaaagcaggttgcataaaattaaaaattaataaatttggcctcatcaaaattaaaaacatctcctttttgaaagacacttaagagaatgaaaagacaagccctagactgacagaaattctctgtaaagcacgtgtctgataaatggcttgtatctagaatatataaaggattctcaaaactcaatagtaagaaggcaaacaacccaattaataagtggacaaaatgtctgaacagacatttcaccaaaatgatatacagatggcaaataagcacacgaaaagatgagcaacatcattagtcacgggggtaatgcaaactgaaactacaatgagatactactattacataactgttagaatggctatcattaaaaaggctgactataccaaattttggtgaggatatggagaaactggaactcttatatactgctgatgggaacgtaaaatgatataaccactttggaaactttggaatatgatctctataataacacaaactattctataaaaacataaaaagtggaagttcttcaatttatgatgttagtacaaacttgctagaaaattgcaagaaaagaaaattattaatcaatatgacttctaaacataggtgcaaaactcaaagatattagcaaaacaaatatggctctatctatcgtctatctatcaatcaatcaatctatctatctatctatctatctatctatccatttatctatcagtcatctaattaccatgtgaagttcaccctaggaatgtcaggatagttaaagacaaaaaatgttaacttaatttacttctttaatagattaaaggctaaagtcatattcttattaatagataccacaaaacaaagcaagcagccaaacaaaaagcatccacattagacaaattttaatacttattctaaggaaacgctctcagaaaaccaggaaaggaatttactcaacccgagaaagggcatctatcaaaacctgatagcaaacatcatttttcatgatgaaactttgaaatcattgctagaactaagacaaagaaacctaccaccactgctgttcaatactgccttgcattggaactaacgactagacagcaagtgggttaaggacagcaaggaaaagccaaaattgtgtttaattgcagatgacataattgtctacgtagaaaatccaagagaatctgctctcaaactattagaagcatgtgacagttcaacaaaattgctggacacaggacaacatagtgaaatcaatagccttcctactgaacaacagtaccaattagaacatgtaagaaggggcaaatcctatttacagtagcagtaaaatctataagacgcttaagagaaaatctaacaaaagatgtaccagccctttcggaggtagtataggagagtggttcagtggttcacagcagaggatcctaatccagattgtctggcttcaggtcatggccctactgcttcctggcttgggaaaattacttgatcacttggtgcctcagtttcctcatttgtacaagggagataataataatattcacctcacagggaagctgggaagattaattgagtttacaaatataaggtgtttagaacagtagctggcacatattaacttctatataaatggttgttattgttatgaagaaaattataaaatttaattgaaggacatgaaagaagagctgaataaatacagagatagaccatatccattgatgggatgattcaatatcagaaaggtgtctattttttcctggttaattataagctaattgaagtttcagtgaaaatcccaacaggatttcctttttacttttttttttttttttttttttttttgagacggagtctcgctctgtcacccaggctggagtgcagtggtgcgatctcggctcactgcagcctctgcctcccggcttcaagctattcttctgcctcagcctccggaatagctgggactacaggcacgtgccaccatgcctggctgatttttgtatttttagtagagatggggtctcatcatgttgaccaggcttgtctcgaactcctgacctcaggtgatccacatgcctcagcctcccaaagtgttgggattacaggcgtgagttaccatgccgggccccaacaggattttcaatgggatctacaaaactgaaaatttgcataggaaaaacaaaagtccaagaataaccaagacaattttgatgaaaggcaaagactgtgccatttgacctacttgatattgacttgttataaagctgtctctctacggcagggtagtactgccacatgggccagacagaaagaccaatggaacagaatagagaatccagaaataaaggcacatgtatatgggaacttcgtatagaaaagaagtggcattttaaatcagtgggaaaaggatggactattcaatgaatgatttggatattattttcttcatatggaaaaagtatgtaatttgatcactgcctcaccccaaacagaaaagcatactgtaaatgaggtaagtatacgtcctaaaacataaaggaaggacattctgtttactacctttataactcagcgggtagacaagtattggtaaaacagaacacaaaaggcaaaatgcctgaaagataaatattgatacatttcctacatcaaaatgaatgacttctgtaggacaagaataccataaacaaagttaagacaaaaacagcaaattagaagagaatgtttgcaacatagaaacagacagaggataggtttgcaacacatataaacagcagaggatacaattatatcaaaagctctgggaagccaataaggagaaagtcacacaatccaatggagacatgggcaatgggaaaagacaggcgattcatcgaagaggaaattcaaatggccaagtggaaagattcccaaacactaggaatcaggaaatgcaaagtaagcaatcatcacatacccgttcacccatcaacttcacatgaatttaagtctattccaagtgtcacttgagaatgtgatacactgctgtaggagtgtaaattgcttctctatttggcaatgagtaggaagttaaatatgtatatattccagtatgcatgacccagaaggaatgtcaccagtatgactcagtggtctcgccctccacctgtccatcctaggaaacctttacactgcaggctatgaggaactaagtaaaaggatgtacctgcagtgttgtttgaaatccaaaaaggttagaaacaacctaaatattatgtgggtgggtggacagcaggtagaagaaataatacattaatggtatgctcgtaaatatttaacaacctgctatccaggaaaaaaagccttaatttggagaatttgccaatttctgggatgtaaatactctgccatggctgatgtctagctaccatcgtgacatcatcaaacacagagttgggaaaagatatgcatgatcagctcttgcgagaaggttcttggggcaagctccggcacaccattgattgttttctgccagcttgcaagatcaatgaagaaactagggtagagctgaaaacataatgcttaggaaaaaaagcagtttgtagtatggtgtgatcaatatgatcaggtttatataaatttctaaattacataaaatggtacaatgcatgtatgtatgttaaggaatagaacataaataggaagaaagcactactttggggatagtgtttgcctctggaaagagaaaggaaagatgaggactaggaagggatgtaaaggaacttcagccatatctctgtggtctcatttttcaaatgaaaagaaccgaagcaaagctgggcactttggcttgtgtgtgtagtcccagctacttcagtggctaaggtgagaggattgcttgagtccaggaattagagacgggcctgggcaacatagtgagaccctgtgtctacaaaaaataaaataaaagtaaaaaagaaagctgaagcgaatatgtcaatgctaatattgattccttttgaatcaatattcaaaaggtaggggattgtaataatacattttagtccatttaaaatatgtcactaaaacaaataaaatacaaaaaaaaaaaggtctgatcatgattatgtaaaaacaaaactctacgttgaaaaggtcctgggataacacactctaaaaggtttctggcaattacatttggactcaggaccataacttttatattttcctttacttccaaattttctgtcacaagcaagtgttactcgtgcaggggcagaaattcactaaccttgagggtgttgggctggattatggctctgggcccttccacacagacttcgtcttcatttgctgggtcttggcatatttcagaattccaagacattttctctccgtccagaggcatggcgacctgggttgtgggtggggtgggtgggctttcgtcttatcatttcactggaggaaagatccattgcggcactatttgcccagcctctatgaggttcaaagtggtcgaacaagccaagagagccacctggaagcttggtcctgggacctgggggtcatggaggggaatgctggcagagaagcagctaggttaggacagctagctgctgtattataccagctggtatatgggctgactataccagccctggaatcacagacctgggtacatctctggattgccacttaggagctgagtaacttgggagaaaggtgcggtttgttcatttgtaaagtgggtcctgtggttggctgtgttatagtgcaacgtattagcagccccatcctggagggagactgtacttgcacgctccgctgaggtcacgtggccatgtgaccctcagtgccctccctgcccttactgaacttgcatgtggtggttttgtgaattgtttgggccagcgacgctgtagagtgagctcaccacccctgtctctctctgttacctctgcacaaagccagccatgtgcagctccatcagccggggtcccgggaagaagataacaggggtcagagctgtagcccactcgagatgcacacgcagcaggagtgcgaaatagccttgaagccgctgcgttttggagggtcattcacggctgtggtcttctagttcattccggctgaggcagggctgtcatgtgttgaggacagaatgaagtcacctatgtgaagtgctcagccaccagctggcaaagggggaggtagcaggcaggtaggtgaggatgtgctgctgtcaccaacaacccacaactctcagtgacaaaacatatcacatgcgtgtttctcactcactcagcacatcgaacagggccctgttatttgtactcaattaaggactcgggctgatggacaatctctcttgaggagtgcttttccaagatcctgagtcagtgaaaaaaagaatttgtcaaaccctacagaggccactgaagctgcactcagaagagacgctagtcactcacctcaccttgtactctgcaaagcaagtctcatgactacacctaatattaaaagggatgggaaagtgcgaatctaccccaggcacagaaggaggcgagaagcaggatgtgtgtggtcagcactaatgacctcccctgtggccattcaataaatgctagccgctgctagagtcaccattaatcatagcatttaggctaattccaaatggagaaaaggtgagacgtagggatggcactgtcggcgggagcatgagtgtgtgcagatgtagagtttgggaagggcagctgtccagggaagaagcaacggggcacacagggagttggctggagacgcagttggggccagactgtgaagacctttgagctgagatgttgtcatatggagctgggagcctggaaacatctgaaccaggaaggggaacacggaccacatgagggaggggtgaggctctgaattctggcagagtgaggaggctggctcaaggaggggaagggctggagagctctgtgtgagtgcatgtcgacagggctggaaggaggacaggctgtggggggtgaaggcgtgggagtcgggatgactccagtgcatcctaagtgcagacaaagaggaggtccagttccagtttttttttttttttttttttttgagacggagtctcgctctgtcgcccaggctggagtggagtacagtgccgcgatcttggctcactgcaagctccgcctcccgggttcacacccttctcctgcctcagcctcctgagtagttgggacaacaggcgcccaccaccatgcccggctaattttttgtatttttagtagagatggggtttcaccgtgttagccaggatggtcttgatctcctgaccttgtgatccacccgcctcagcctcccaaagtgctgggattacaggcgtgaggcaccgtgcccagcctccagttttaagagaggatgctgggtttggcgttagaggtgatgaatggctagaatcaaaatgacaatacctcatttaagaaggttgtggatcaacagggacaatcttctgttacctctttggtaaactggttgacgtccatgactaaagctaaacaaacagaccctatcactcagcaattcctagaatttcttttgaagagaatcttgctgtgtggcccaggctggagtgcagtgtggcaccatcctggctcactgcaacccctgtctccaaggctcaagtgatcctcagcatcccgagtagctcggaccacaagcatgcaccaccatgcctggctaatttttgcatttttttagtagagacggggtctcccatgttgcctcggctggtcttgaactcctgggctcaagcaatctgcctgcctcagcctcccagagtgctggtgatatgaactgctgcacccagccagttcccagaattgtgtacacatgaatgctgagccacagaattgttgttcataattagcctccacactgaacaaacaacctatgtgcccaacaacagtggggtcagctgcagtgtatttctgccatagaatattacacaacaatgaaaaatgaataaattacagttacatatatataaataacatgagtgcttctcagaaaaaaaacattgtgcaaatgaaagcagttatgaaaacattcctaccttacaatttactagtaaactagtaaaactacagtgttaaaagtcaagatgggggttatctttggggtggtgtcttagtcagtttggactgctagaacaaaaatactgtagcctggacggcataaaccacaatctatttttcacagtaatggaggctgggaagtccaaggtcaaagtgccggcagatcctgtgtctgatgagggcttcctgatttgtggatagccaacttcttgttgtgtcctcatatgacagagagagagggagagggacagagaggggaagcaaactctctcacgtctcttcttataaggcggctaatcccattatgagggccccacccttgggacctaatcacctctcaaagaccccacctcctaaaaccatcacattaggggacaggatttcaatatatgaattttgggagtcaacagctgttcagtccatggaagtggagagagaggggagtgagggaggcctcgagaggtggctagcgccctttcctgacttggtggttagatgagtgtttactttgtggtcgttcttcaagctgaacagttaacttttgtgcagtcggcttgggctgccataataaacaagataggataagtggcgtaaacaacagaaatgtacttcctcccagttctggaggctggaaagtccaacatcaaggttctggccaatctggttcatggtgaggccccttcctggtttgcaggcggccactgtctcgccgtgtgctcccgtgagcacctggggagagagtgggcaagctctttggtctcttcctataggggcactaatctctccatgaagaccccaccctcatggccttgtctaacccaaatctcccaaaggccccacctgcaaacatcatcacattgggggttagggcttcagcctgtgcacttgaggggacatggtgcggtgcacagcacactttccatgcatgttctctctgtcaattacaacaagttgggggcacagaagcacagggagacatagcctggtggggccgtcagaaggagtggagcatgtaaacctgctgagaagtggcagcgaaaggtggtgccactgaagtaaagggaggcgcatggtccacagggtgagaccacgagaactcagcatagagagaggccagcatgcgtccactggttccaggaacaggaaagtcattctcatgccgtctgacacaagtttcttttctggggtgggatggatggcaagaagccaggttggagggcacggcagtgagtgaggagatggcgagtgtagctgtacccttttggcattgtggttgtgaatggcagaaatgcaatgtgctggtggctgaagggacacggagtgaggatagcttttgaatgtggaagagacccaagcaggcttacgctgtgagaagcatctggagagatgctgacaaatttcaccttattgagctttcctctacactcacctttataaaatggcacctcctcctccccgttcctttctatctccatctccatccccgccttcatctccatctccatccccatctccatccccgttcatctccatctccattcccgccttctcctctgcaccagtcatggcccacacagtacatgctcactttatgctgtccatctcaccccactgggaggccagctccacgagagcagagcatttctctattctgtcttccacactaccctagtgctgggaacatgcctacacatagtagatgctcaataaacattcctcattgaatgaatgaaagtacagagaggagtctgtacagagaggctgggggtggcaggatctggagctcaggctctgtcagcgggggcagggctgtgtgcagatacagatgaggaagcagcagattgtgtgatttagtggaggtggggggtgggcagggggctgagggagagtcctcggttgtgctggagggggagggcttccaggaaatggaggagacagtgtggaggagcccagacactgcttgtggtgggggtggggcaggatggggtggtgaggggtgaggaggggatggatgcaagccttggggcccagtcaggttggaaagaccacccactgcagggtccccagcatggctcagaagctgatgaaagggatgatgtactgtgtcaggccagagtggggctgttttcattgtagtccaggacatcccgggagatgaggctgatgccagcatagggtgggtgttttggcaggattgacagatagggagaggggacttctccatgatcagagagggaggctgaggaacatgcgggagggtgggcctcagcatgataacaagagagctcccaggaggcctgacccctgctgagcaggactggccaccccaacccagtggggccactcctgccatcacatccactttacagatgaggttgtgcctgggcccccttgtggtcaggacttgaacccagcctgtctttctcccagcatagccattttgctggctccagctagagaggtgagggggtgtggacagagagtggggggctggccttaggatgtgaggtggggggcatgtgagcagacaggtgagagagagagaggagaacatgccaggtgggtgggggccaatgtgggtgtcggtcactttcctacggggtagaaagtgacaaagaacaagcacatccttccggcccttgcatttacctggtccttgaatggagtctgcacagctgggagattttggcttgttccacagtgaaaaggtagaggctggaacagggcagggcacttgccaaagcaggtgctggcagggccccagggcctctccccaggccagcccttgcatgacagcctgcagagtgctggtggggctgctggggggctttcatctcctcataggtccattctggggatttcaaaggcacgaaagctgtagcttcaaaaactccctctcaatctccaagaaatctgagacggcatcaccttccctcgtctttcccacagccccagtctccctgcccccaacgcctttggactctcctacctccactgcagtttggggagctgtctggagttcccccagaaccatttgaaacaagtggaggccattacagaccagcccccacctggagcatggctccactgatgccttagacccaagagcccctgcagctctggtcaccccactgcacttacccctcccaggcaagccacagagtccctcgctttccaggaaggctctgttgagctcctagggagggctgatggttcctcacccacacctctgaatccccactggggcttgtgtcccgtgcaggggactgtgattcattaggcggtgggtcacggtggaggaggtggcagcttggcaaaacaggaggcaaatattttttgagggcccactatgtgccaggctgattaccagagggaggttcctgtttggcagagccctgggtttggaggggagggagggaagggaggagggggacgcattttccagcctggttttggaggtacctagctctgtatttctttaactttctcactcgtcaggagaggtgggcatgaggagagatctcagagccctgcctgggggaggcccaatcacccctccagccatttcatccagttttgccttgtcggctgctggaccccctccaccagcttcttcacatgtacttaatgctcccaacgggccccagaacttgcgcgacccaccctcttctactaatgaagggagacagtgtccttcccctcccccgagtccccattctccaggtgcgccctcttcaactgcgaccccactccttccttcctagtcctttctgccttctgcctgcgaggctgctctcctcctgcccccttcccagcaccccggctcttggccttctctcccataactggagcacctgggcacccaaggtaccctccccccaagctcagctgatcaccctctccccgcaagctggcggtctccttcctccctcccccgtggcgcacccagcaccaaggtgcccaccgcgagggcccgagcacggcggtgcagcctcggcttgggcgccggctccacctgcagggccgcgggggcggagagcgggcggcgcgagggaggggcctgcgacagcggcggcggcggcggccccagcccgcgcagcccggctcggccccggcttggtcggcgcagcgcagcgccgcgcgcgtcccctcgccgccgtcgccgcagccaggcgcaccggcaccaggccccgccgccgggcgcacggacgcagcgcgcacgggccggccgggatgcgcgcctgggccccggcccgcccgaacccgcggccgccgcccgcccaccgcgcgctcgcttgaccgcggcgcccgcccccggccgcccccgcccgtccccctgccgcgatgccctcccttcggggccccggcggcccgcgcccctgctaggctgcggcggcatggcccgcgcgcccggcgcgacctctgcggattgcatcggtgtgtggcggcggggcatgcccagagcaccgggcacggccttcaatgggcgaggacacggacacgcggaaaattaaccacagcttcctgcgggaccacagctatgtgactgaaggtaacgtacgtgttgtctgagacccctccggccggccgcggcgtggggatgccgtcgcaccgaatgccctccgaaggtttggaccgcgcgatgtgtgtcgtgtccccccgccccaccccaccccaccccatcccaccccaccccaccccatcccatcccaccctgcccggggcccaggagggagggagcccgagggtaccggcctccgctgcccagcgccggcacagggcagcgccctcctccgcgccgccctccgggaggcagctttcctctcccaagccaggtggcatcctgattcggccctgaccataattttttaaaaggccacggctgtggctaatctggtgaagaaatctcggggaaatttaatggtttaaatcctggatttgccatttcagccctgcccaaagcccgcagaattttctaggctgccctctccctggagaagaagagggacccggggggaaaaaaacataatccattgccagatcctcctgggaggcccgcctgcccgggcccctccctgtcctccagaggcagggtccctgagtgggagggagaaggcggctggtttggggctggcctttttattcctggtgagttatattgagacaggagcagctgggctaactgtcgggattttccaaaaaagtgggacatgccatcccaaacaggccctgtttaaaatcccctaagttggccctacaagcccaacccccacccccaccctacccccgaggctggtgggtcagcgcccctctcttacaggcctggaacttccgggggccccctggtctgcctcgctaggggaacagtggggacagcttccgtgcgcaggcagggcccgcggagtgaccccgatggaggatggggaccgggaggtctgggctcggggccgcctgtgctggagccctgcccgagtgcggggactgtcagccgctaacccacgggctggcggcccggccgcagaagtgtgcgcggattccccgggtgggtgccccagtgggaggggccctgggcacgggtcccgcggggcaggtgcgcgtgggtgcctgtgtcagggagaccgagtgggccaggcggcggagaccgggctcctgcggctgggtccgcctcctcgaagcctggctctgccggaaatgaggccgagcggagccggagccccgcggaggcccggggagcgcagcgcgagcgcgggcgcgggcgggctcggggcgccctggcccgggaggcagaggctgggcgtgggacctgggcggagggaggctgcgggggccgcgcccgctcccggcgggagaaccgctgagtcacgcacgcttcgccgccgggtgtgtgcgagagaggggcagggctgcccgggcctccgggccggtggggctctgacccggccgcggctttgggaggcccggggagctgagagcggtcctttgtcgcctgcttcggcgaggctgagtcgggatcagcgtgggtccgggatgtggtttctgctcgcagcctgcagcgacagagggttggaggaagccgccgggttgctggcccgtgcctcggtggcctggctcgggccgagagcggatcttggcaggttgccccgctgctcccaggctcgctgtggtctggcttcctggagcaagcctctgtttgctcatctctacgttggggatgacggtgggatggggcgcagggctcgttgtgggaccaggcgtaaaaagcgccatggtggacattttcaaacattaattccctctgcaccctgcccgtccccttttctttcataaattcaccagccctcagcagggcacaggaacggggacggcacagttctggaggtcagagcagtgctatccaatccttcatccagacacgagatatttaccgagcacctgctgcatgccgggcactgttttatccctggggactggacaaagactccctgcccttgtgcggcctgaattctatcagggagctatatgaccttgaggtctgtcttctcaccagggctcagtctccccatctgtaaaatgggagtgaatcctgcctacagggtctggaggtttctgtgaggagcaggtgcaacggtgttgaaggagccgttcagagctatgcattgctaacgtgcagccaaaggatgctgagcacctgctgtgtgctgggacctcatacgaaggctcacctacgccttatccccaccttgagatgaacaaaccaaggcctggccttgtgcctggtccagaccgagtgccagtgtgtgcagggcatagggctcaggtgctgcggatgcagagagcaggatcggaacaagaaacaataataatcattataataggtagaattctggcctccctaatgaaaaacacactttcacactgttgcatcctgactatatttcatgctcagagcacagggaaggtcacagatttgaatgtcagaatgtcagacttgaatcatgttaaagtcctgcctctgactcctgactgctgtgcagccttggacaagttactacaccttcctgagcttcactttccctttgtaaagggagaaataataacgacctttcatacagggttgctgggatgatcagtgattttgctaatatcaaaagtgcccagcacagtgcttgggttgttggaggcattgaacacatggcattgttattatttatatgccttgtaactggaagagcctgtgggcaaacagtggatgctaaaattcagtttgcggaagaaccaggtgcacaaactcctgttctacctgtggttgagtctacactcccccaccacaccccagctgctctgatctacctcctgttccttgagcaggccattttctttcttgcttcagggcgtttgcaatggctgttgcctggaatacccacctcctgcctttctcaccactgactctttctcatcctttgggccccatgtccaatgtcatctttgcccgtgggagccctgcttgggttcctgagtctcttgtaaaatctcaaacatcttaggaagagtttaggttttgttagtcattcacatcttggtgtgaattcgtcagagcaggttggatttttttttttttttttttttttttttttggtggcagggctgggtggcttactcttggctgggctcaactgcattgagggttatggtgatgattaggtgtacctgcaggccacctgggggcacagagaactttgcatgaatggggtcagggtgtggggagagcagtgcagctgatagggcactgggccctgggccctggaccctggagggtgctaggaagtctccatctagttagacatttctcaagagctggatatggttccaggaaggactcttcctggctctgttctttctctttttgcggcaggcctcagtacttagctttagagtgagttgaataagcacttccagactagactgaacttacaaaacccatccatccttcctttgcttagcaccatttgccaagcacatcctgccctgggcagcagtgatgaccaagacacaggagctcagccaaggggaggtggttcaggctgaccaggtagatcctggcagtgactgggtctttctggggagcaacagtcactctcatgtgcctgacaggtaaggcacttccggagcacacttttcagctgaggccagaggcacagcttccccttgtttgagcatctcagccatcacacactgttggacactcatgctttttgcatctgcataaaggatgtacccatgttttcctaactcccatccctggatgtcctgtgtgatttcagagtagtctgtttattcccacagagttgtcctgattttatagttgaggaagtgaaggatgcttgggaattgctaaggtcatcatggggtcctgaggctgtctgaacgcagcaggcaggcaggttttcctgcatggaattgtctgcaggttttgaactggttgtgccctggataccatctactttctgcccaggaaaccacactgaagaggggatgctgcttgtgggagactcagcattcagtgaaatctgcacccttatggtggacgttgcagctgatctccacaacagttagtctctcttcttccaaggagaacacatatggttcctagtaagagatctcaggccatagctggatgtgatcagtgcaaggatgatctcattccccttgcagtgactggttccagaatggatgtgggagtcagttctggaggttgagtggaaagtagggagaaccacaggtagttggtccctctcttgtgatgggaacagggaaaccttgtggtggctggcagccatctgacaccatgaggggagcaagtcttaggccaccaccgttgatggcagggcagagagtgagtgagatccaggacatagaggcctgatgtccaggccgcctctgaacttccagttacatgagctgttacttttccttttcgttgtgcactttcaagtctccgttacttgcagcccatagcaccccaactcgtacagccctgactgcttatcaagaaaaccaggaggctgatctgtaacccacagctaagactcgagatacataaaacccagagggatttttgtttgctttctgttttgagaaccctctttcatttcactcaagtcaaggttgccaatttctggttttccctcctcagtcctattgaggaggtatttttggtcagataagagagcctgagatctggcatcgggagatctgggttcctggtggggtctgaccctgggtctgtaatattgggcaggtcacacggtctctctgagcctcagtttattcttaatagatcagtaagtgatgatgtctattctttaggggccagagttagactagcccttagaactgtcatcagactggctagcctaacttccaccccaacctatggggaaactgaggctaagaggggggacattagtggtggcacagagggagattagggagagtcagcctttgacttttgaaaatcaagatgtggactgttcagattctgtgttcctttcgcttctgtttggaaacgccacttacataagcttcccttgggcttcacagcgagtgtgggctccatttcagtgctggggtgccctccatcaaatcacatcactttctgagcctcagtttccctgcactgcctggtgccctgggttgtcatgaggctgtaaggagccaagggcatgtggactctgaagttctacacgtgtaaaaggcgactgctgtcaatttccccaaattgtagtgtaggccaactcccacgcccctgctgtaagcaatgtgctcctttctttttaatcaacccgaacttaaagcttggcgcagtcacagagcacggtttttctcattttctttctggaagatgaaaatcaaattctaataaaatttttccactccatctcctgactgttgtcatttgctacactttttagtgtttatccttaaagcttgcagagctaagggatgtttggtaagaagtgtttaggccttgagactggaagagccgctgtatgaagcgctaggctccatggagagtgtgatggggagtaagagaaggagagtgaactcctgtgagtccaccaagcagagggacatactctcagcaactggggtatttccttccagtctttttttaatgcccatgtctgtttttaatgaaaactgtaatctgtctgtatcaacaattttgaaggctacttttctagtttggcatgagattataggaattttccagggctttgctccagggctggcttcatggatatgcaacctgtgtggtcatctaggtccccacactcagaaggacctgtgcttgggttcatgttctgctgttactatcttgaaatttttaagaatttcactttggatcctgtgttttgtaagcgaaatctgatgggacgggggagcctgggaatgagcagaggggtacgtgtggcaggcgagtctgtggttacacatattggctcccacagcacgctaccctgtgttcacttgagcgtctgagccccatgcacagtggacagctcatgcaccttctcagtgcgtctgtagtttcacaggcaggggccatgctttcaaataatgctccaaggcattgatgttctcatgcagtgacttctaagaaacatgaatgacgcaggaaccctatggtgtcctttcttaacgtgtgttacgtgcccatatttgccaatcgctgacactgaaaatgattacacagaagggaagggaaaaagagggcacctatagttccttttcctcctagtccttccttgtttattattgaaccaagggtagagggtgttggaagaatgtacacatatccagaaatgaaataagaacagttaagttagtttcctctgctctggtaagaacaaaatccatatgcgaaatataacttgtgcattttggtgagtctacattccagttacgtgctcttatgtttgcatttaaaattggaggtgcacactagaatggtgagtgataaaatgcacgctaagagtttaagcttttttttttttaaatttgaattgacattaaatagcaaataacaccatgacaaaatatggaaggcatgaaaaggttttgtatcttagcacctttaatgatgcttttcctttgctttttgaataagaggctctgcattttcatttttccctgtgccccacgaattatagggttggccctgctctgctggaactctgggtagggtgaactccttggccctgccttctacctccttggctttcgtgattggtggaaatggtgagagcctgccatccattgggcagctcttccctatggggaggggttacaatattaaatgtccgtgctcctctctcacccattgggtccatgggcctctgacttccaggttgctctacaggggagaggccaacagttatcttattttacaagctagaagttagacctacctctccccgcaggaccaaggggtggggaggtgaagtaggggtccatagctcttttttttcctacaggtttaccattaataaagcagatttttttattcctgtcttgcggccagtcttttctgtgtaatcccaagtcccagcaaggaagaggggtgactggttaccttggccccgcccccaagtcacacagtacacgtattgacaaccatcatttcattggctgcatactattcctgtgatacatgtgtcatcattcagtagttcaattaatcatttccttatggctggatatttagttccctcccttccctccctccctcccttcctcccttccttccttctctctctctctgtctctcccccacacactttcttattttcataactaacactgcaggaatgaacaccatttgtgtgtgtgaagaccccctactcccatcgttcccccttaaccttgggatgatgctcttcagaaggaattccacacgtgctatttcatataaagatcactagcatttttaatgttgttgacacacattggcagattattctccagaaagtttttctctttaaccacatgctgatcaacattaggtagtctaatttgtttgacctttgcaaatatcaaagatgaaaaatatttattgtaattcacgtctgcataccaatgaggttgaacattttttccttttgttcagcgggtattggctgatccctgttatgtgccagggtgacattagattctagacatacaaagttgaagagcaaggctgtgtctgccttgaaatgtggactctcctctcccagtgtcttgggtgccactgcgggacctagctacttctcaggagagagtctgaagctgctggaggagtctgtacatccctcagcaccctggggagtcctgttagttacacagggccttgcaaagacaggcatctcaccattaagcccttgagcagaatgatccaagtggactttaggatgaaataattacaaaacaaacacaatagccattattatgattcaccatttattggctatgtactataatactatatgctggacatgaggctgcgtgcatctcattggagatgccccagacctgatgttgtgtatattatttccccattttacagaggagaaaactgaggctgaggtgcttgttcaatgtcacatagtttgtaagggacagagctgagttttgaatgcagcctgccaaacccacgctcctgactgctacattaattggctgggacccacagggcagggttaggtggcctgttcagttctgattatgcaccacacttaggagattttgggatttgaactagactacctggcttggtgctcttgctatctgtgttgcgatgaaaggcaatcgagagggttcagcaggaggagagacccccttcacggcacaggtagatggcagtggcagaggccacaattggacacgtggtccagggactgaagggcaggtggcatttccaggttggggggtgatgatgtgctgggacatggtattctagcgcattctgggcaggaggaacggtgtgtgcaaagtggcataacacttgtcccctgacagtgtccagctcctctgcttgagaccaggaggcagttagttagttgccagccggcccgggagcaggacacacctgggggcccctgtgctgcccaggacaggcactgccctccttgcacagtgggggccattgtcctccagaacccagggctgaatgtcccattgaggcagaacaaaggctgctcagaggttcccagctggggtgtgggctgccgcaagcagggatgggatctccaactgcaggccaagggcctcctccaggctggcctggcctcctgcagccccacccccacccctcctcaggaccaggactgttgctgctggaggctggacctgggcttgggctcccaggcctgtgctctgggtctggcacagctgccgtgcccttggcagcttcttcatcccctgggcaatttccccatctatgaagcagagagagagcgagctcccaaccagcaaggctttcaggcagaattgaatgaaatagtgcacactctgtaggttaatctcaataaaagggagctctttcatgatcatgattagcttctgaatgtttttttacaatttcaaaaaagttttgatgcaaactttcaaatttgtgccacttctgggccaaagtgtttaagaagggagtgcaccttcccccctccctctgtcccagagaagggagagatgccgctccctggagcccctcatcactctgtggaagggactgctggccaactgttacaagaggagaaacttctttgcatttgtgagaaaatagtctattgaactgcttccaatctatcaagatcttgctgtacttccttcatttactctcccctgcttttggatgaagaatttttaggcaaatccaagactcctgtcatttccccgttccatctgcaggcatctctgagtgttgagggcatttcttgtagcccagtgctgttatcccacctcacaaaacatatcctgattctttgttacctaaattctggtccattttatgaacgtccccagttgtctgagaaatgtctcttatggttgggtggtttggcccaggatccaaagtcctgcacctgcgtttggctgttctgtctcttgtcttttctgacctagactcagcctccatccccttttcaggctaccaacttgttgaagacatttgttattattttattttattttttttaagacggagtttcactctgtcgcccaggctggagtacaatggcgtgatcttggctcactgaaacccccgcctcccgggttcaagtgattctcctgcctcagcatcctgagcagctgggactacatacaggtgcccaccaccacgcccgactaatttttgtatttttagtagagacggggtttcaccatgttggtcaggctggtcttgaactcctgacctcagataatctgccttcattattattttagagattacagtgtcactcccactgtccctaatttgtgcctggattccatttgccctgtgggtctggaaggctgagaggtggttgctgggacctgggcatcggccttggggctgcccctctctcctccaggacccctttctgcagagtggtgccctcgccactccctggctgagtgatcttgggcaagttgtccagccaggccgtgcctgggtgaccacatctgagctgggggtgagcgtggctgcaccatcctctctgggatgtggtgggtgttgaatgagatggtgcatgccacgtgctccgtgggcctggtgcctgtgggtccctgtcttacccccatgatggggatgtggcaggaactggggtagccaccgcctgcccacacagtgctcactttctgtaggggagacacccctcagctggtcactacatacagcaggaccagcactttctgagggaagagggatgttctcttgggaagtctggatgctgaagacagtttgttactctgattaataccagttacaaagaaatccccacattccaggggcttgatgtcatagaagtttatccctttgtaacagttcattgtggatgatcccagttggcccaggagtctcttccacagagtgatgcggggctccagacccttctcatctgtcagctcccatgtcctctccattctccggggaagagggtatggggaaggtgcactccctccttaaacactttggcccagacatggcacttgtgacttccctcacattccattggccagagctagtcacatggccccacctaatgcaaggggctctaggaaatgtagtccctggctgggcagcccagtggctactctgcagtgggaagaacctgcatcttggtggatgtcttgccatctttgccacatgaccccacaaaacaaacctttacattctcagtccaaaaaaccctactaagaatcctgtgctggagacaccctcactcaacccctgaccctcccctctccctgcttcagtgtccacacgtgcacggtgctgtgagatgcagagtccagagtcatgcggtggctaggaggtcagggacgccttcctgggagaggcgatgtctgagctgagtctgcaaagccaaataggtgatgcccaggtggatcaggtaggagagggattccgggcttcggctgcagcaggggtaaaggctggtgtcttgggagagggcatcctgtgtagagaggggtctgtgggccactgagatttagaggatgtgtgtggggtggggtggagtgggagaggagctggagcgggatgggaagtgggaggcaggactgtttgtgaaaggcttcaaatgccgagataaggagtttggattgtatcctattgacattgtggaaccagatggagatggggcatttccctttgtttgaaagtattttgatttctattggctgtcttactacaaaaaacatatgtagtcatagcaaaaagttcagaaaatttagaaagagaaaaggaggaaaagaaaatcctaccactgaaaatattttggtatatgtgtttttgcctatgggtatacatactatctaggtatatatatattcctacatttttttattcactgaaagatggtttttgagcatctactgtgtgcgtatcctattttgtaatctttaaaattttctcttaatgatatgggagctttctagcttagaaaataacacagcccattttcttagcttgctgggacttctataacacagtgccacataccgggcagttgaaacaacagagacttaccgcctcacagtgctagagcttgggagtccaagatcaaggtgttggcagggttgattccttctgaggcccctctccttggcttatagatgaacatctccctactgtgtcttcacatggtctttcctgtgtgtgtctgtgtccttagagggacaccaggcatattgagttagggctcatccatatgactgcattttaccttcgtcaccttgttaaaggtcctttttgtcaaacacagtcacattttgaggttctaggggttaggacttcaacaaaggaatcttggggagggggcacatttcagcccaaagcacccgtcatcattggtaatatcagtcacatgcttcttctatgtattttaaagagttccatgctggtgggtatcagaagttatggttggtttaggatcatgagcagtgttgtgagggcatctttgcacctttttgcgtgcatatttggttatttccctagggtgtggaatggctgcttctgagagtttggtctttctgaagtatcttcatctaatgtcaacttttcctgatgaccaaacttggtactaacaactccctttccccagagcattgctagtggcgactagatccaacatatttaatatttgccaatattatggtaaaaattgctgtttttttgtgtgtgtgtgacagaggcttgctctgttggtcaggctggagtgcagtgtcgtgatcttggctcactgcaacctctgcctcccaggctcaagcaattcttgtctctcagtctcccaagaagctggcattataggctgtgttcttttaaagcatttttcagtgagattgaacttcctttattatatttattgaccatggcatatattcaattgtaagtttttttgtgcaccgttcttggcctgtttctctactgtaattgtcatctctcttgcaaacactgacccttggtttgttgtttctggtagcattgattttatgtggttagatgtcatgactcttgtcctgctgagcatggatctcccattccacaatcatgagaagaaccaacaatatggaggaggtgacaccgtgtagctttggaggctaagtaaaaaataggtcatgtgcttctgccttggagccagccaccatattgtgaggaagcccaagcagtttgtggagaggcacatgcagagaggaaccaaggtcctggttgagctgcctgcctaatatccagcaccaccttgccagcaggtgagtgagccatcttacaggtagagcctccagccctcaggcaagccatccatatggaacagagatgagccattcccaccaagatctacccaaactgcagattcatgaaccaaataaatggtttctgcttgaagccattaagttttgaagtgctttgttacacagcagtgggtaactggaagagtcatggattcctgacattgaattcctggtcctcctccttctcaggctacttgtctagatgttctgttctctccatgattctgtggatccctcagagccttccggtaacttccttctttgcttgtgttagcctgggtcaatctctgttgcttataactgacagacatgggaaaccagccccagcaatgagaggtgacccagctcagatcatgagacaggacaggaatccaggcctttctgaaacatagcccagggtcccatcccacaacgtgtcagtagacaccatgcctgctgggtcatgcctgcttccgctgcaccctgccagctcagcacctgctatcttccaaaggccattgctgattgcttgtacacacctgttagttcatgcacagacagcaaagcatgtagttgtgctgcctccttgccttcctgctatgatctgaatgtttaagtaccccctccaaattcacaggttgaaatccagacccccaatgtgagggtatttaaaaggtggggactttgggagtgatgaggttgtgagggtggagccctcatgggtgggattagtgcccttataaaagaccttagagagctcccttgcccttctgtcatgtgaggacgcagcgagaaggcactgtttgagagtcaggaagttggacctcagtggacaccaaatctgctgtgccttgatcttggacttccagcctccagaattgtgaggaataaatgcttgttgtttataagccacccggtctatgatattttgttatagcagcctgaacagactaagccactcccagtgatgagcctgcatgatgttttacacaaacagatcactgaaagaaggaattggccagcaaagatgatgctcagcagagatgtgaaagatgttaatgctggaagtgaaatttaaattggaggtaaatggagtcatagaagaaatccatgatcttgggaagctgaagctacccttcaagaagctcttatatgcagccagaggagttgagtgaaggtgaacacactgatgtaaaccaggaaaggagttgtgccccaaagcatggagatgtcccagaggaagcgaggctgggaaaaacgttaaaggaactcttgaagatatttcacagtgttgaaagtgcaaaggataaaatcttggaagctggtctggagaaagataattctgcaaagcatagaaagggtgcttttttggtatcgtaaggtatacaataacagtagcgagcactgtgcaaactctctccatatgtcttttacaaagaaataaagcacttgacatctcaatgtttctgatgctttaaattacattgtaccaaataaatattagttgtactattttaaaaaaactttcccggttgggcattgtggctcacacctgtaatccaagcactttgggaggctgaggtgggaggatcgcttgagcccaggagttcgagaccagcctgggcaatatagtgagaccctgtctcttcaaaaaataaaaaaaaattagccaaggatggtggcatgtacctgcagtcccagctactcaggaggctgaggctggaggatcacttgaacccaggaggttgaggctgcagtgagctatgattgcaccactgtactccagcctgggtgacagagccagaccctgtctcaaaaagaaaaaaaaattcccagtgcattccctatggacatttgtaactgtccataaaagactttttaatgtcttgacaaaaaattttaaaggccacagaagaattgtaatttcctcattgattattaggatggctttaaatggttttagctttcatgctctattttttttttttttttttttgagatggagtctcgctctgtcgcccaggtcggggtacagtggtgtcatgtcagctcactgcaacttctgtctcctggttcaagcaattctcctgcctcagcctcctgagtagctgggattacaggtgcctgccacggcatctggctaatttttgtatttttagtagagacggaatttcaaccatgttggtcaagctgatcttgaactcctgacctcaggtgatctgcccgccttagcctcccaaagtgctggaattataggcgcaagccaccgcacctggctcatgctcatttttatggatccacaccacccgtacagcaaggactgcctgcactcattccaagtggtcagagtggtcaccgcatgggccctccacgtggccaggccacagtgatgtttcaaaccctggctgggggattgcattcaatatccccttattaaaggcggcagctcaagaatattaaatcatgggaattcctcactgtggaagtgggaaggcagcccgtggttcaccgtgaggggcacccagagctccccctccactgcgttcagtgtgcagccctccagccagcctgtctgcttcgggagcaatccatcatggaatgaactgaccgaaggagcgaggggctgaatgatgtggttcctacgccgactttcaatgtgaaaggtgataaaaacagccctgaatattttatggccccaaggagaggtaaggctctttattgaagctgtgaaaatataatccatcatgataatgtgtcccatatcgtcagactctgcgagctaagttgtgtgtatgttaaggtgctctttttgagaagatcttaattttatttctctattttatttcattacagaaacgtttgaacgtgtagacagtagaataaaggggggggggggaaataacatccttcatttcactactccagaaacactgctcacattttgttgcatttccttctaactaccccctgcagattgtactatgttttgtgtcttttaaaatattaaatgcactgtcaacattttcccagatcatcctgcactctgagttaacaatttttattggctgcataatacttcacgatgtaggtattattattcattcaataactatttatggattcattgatccgattagtgttgattgtctataacaggtgtgtgggtggggtagggggattcaggaagaaggaatagggcgcagctccccccccccaggatttctggaatgagggagacataacagatggctgtgatccggtgtgaggggcagggatgcagtgggcccgttgcagcctgggagcaggtggtcagagatgcaaggctgtgggcagcagtggttggtggtccacagcagtaggcagcagggggagggggcgacattcatggcaggagggacattatgggcacagcacggcgtggtgtgttcagggttggtggagcgttcacttacagtcttgcagatcctggcaggtgtggtggtgatctgtccaggcaggggagggagagggaactgagagtcatcaaaagtctctgggagtttggaaaggagagtagggggctcagagggagtgtgagcacttccagcagaggtgagaaagcccccagtcagttgcccagggtgggcagtggaagggaagtggaggtgaacgttgtggggtggagagggttttcaggcaggctgggagctgcccagtgtgctggaggaaggctgggtctccttgaatggtgtttggtcaatgcaagaccacaggagtgtgactagaaggctgggggtgcagatggtggcaggtggaggacagagagagcttctcccactgctgaacaacgactgccccaactttatgggatgagcattcttatgaatgcccattgtcctgtattccagattattcttgtgtctgtccaggtagggatgcaatttcttgatgtagggctataggtgtttttaagggcttgcataaagatttgaatatgatgttgtctagtagagtaaaaatcaaattgggcaaaacatttttgtttgggtgatttttggaagagtaagtccacgaatgcaacgcagctctggagtcatctgtagattacagcaagcccatcagtctctatgtctcttgcttacaacaaaggattgatttcagctccagcactaggtgacttgtgctgtgttcattatcccttgataggtgtctgacaggagatggggcttgggctgtgccagggaggagccgtgtggtgcaccacctatctctgcaggcataactattttgtcttcatggcaaaataatagcgatgatggtgatgaggagggaagctaccatttcttgactgctcctgtgtaatgacatgttggtgatcacattagggctttatgtccactctgggaggtggtgagaatgacatcgcgtttgcacatcaggacgctgagcctcagagaggttgagtcccaggacgaaggccacacagtgagtgccacaggtaccattaccacctaacaaatgactctggagctcagtgatgtgatgagaaccattttattctgtctcctggattctgtgagtcaggaatttgggcagagcttggctgggcaaaccttctgctctaaatggccacccatgagtcttccaagctggtgggtggactgatctggggggactgagatggtctcactcacacattttctgcggggtggggagagttggaaggcggggctcccctctccagcgtgcagtctcagggcagttggactccttcgatggcagctggctttcccgaatcaagtatccccagatacccaggtggaagctgcttggcccttcctgacccctgggacatctcagtgtcaattgtgtcaccttcatttagttcaagcaagtcacaggccggcccaggttgaagggcagttggactcaacctttgcatgtgggaagggccaggttacatggtagaaaagcagatgggataggagactgtgctctggccctccctgggaaacacggtgtgccacagacgccctgggcagagccaagacccccactgggctctgtctgaccttggagccactgccccgctcctgagcaacaccctcttgtccccctgaacagtcacaggaagaacgggtccctctctccatgccattttcctgttaaaaaatgcaaaaacatcccatacttttgctcatttaaacacagaggaaaggaggtgagtgaaagctttctttaggggtagattagatgtgaggcagaccggtggccctgggtgtgcaccgggtggaaattattcttacaaacagggccgggtgggggtgcagcctgccaccgcccctctggccgtctgcctccacaggaggcttgcaggtgcccacatcagccaacgtggccctcggtggggctgtgcttgccttcttgccagggccactgcagtagggaggagtgcagagcagaaacaggtgagctgggctgaattttctgcttggctaattcagtgtggcttgactccaagaaggacacaccgacctccccatcatcttgtttgttcagccttgcagaagcagttttatgagaaaccattacagccccggtggtctgggcccagacccggtgcacaccacgtgcccgcactggtgcggggggaccattctcggtgaatatgatggatgcacaggaagccgccctgccattcagtgagagctcaccatgtgtctgcccctggggtggggtggggtgggcagtttccagcctttgcccatgggatagagctgctggaagtctccccgagctgaggaggcagagctggggtggctggggctgggggttgccatggatacttcctgcaagtcctgacgccgctccttcctctttggggatctgtctcccatactgtccctgctgcctttacatcttcagggtggagagggactctggccatcctggggccaaccatcctgtgtcactgctggtgtttgtgacctgcggtgggccctccctcaactccgtatctccagctctaagccagagacaagaatatcctctgtgggggggtcccttcaagggtggatggagatgaggcgttaggtgtatccgatgctcaggaacggccccgcacctgctcatctttatgatgagcagtgggactgcgggcagagggagccacacgcatccatcctggctctcagcatcccagggaaagatgttctgctctatcctgatcagcctcgccctttaaccaaccacaggctgcctgcagtgtggccgtggggagctggagtcaggcatggtggcagcccttctagacagtaggcagtaggtaagcctgctgatcacggagccgagattctctgtgggacagagctggtccccagcatccctgtggcctttgggccaagaactcagtcggctactttgcttccaggcttgggaacactcagggtaggctgggagtcccctggtctcaccctgtgagccccacataagcctgtggatagcaccagctcagcaggtgaccccctcatcaaaaccccaaactgggatgcttctctggctacataggcatggccacatggggacagtgggaggacatgtgataatttggggcagcggctgaaagcctaggggttagggctactgtgtccttctaaggtggtgcagggcgcacagccctctgggcctcagtttcctcttctgtgaaatggggactctatcttggggccgcaaatgccagtgtcttctctggaagaaagggcgactgctgagggaagcagcacacaggtgtgagggtccaggccccagacgggatcccacaaagacctaggacagtgagccaagagtggagagaggggacgagggtggactggggtgggccccaggagctgggaagtgaggaaaatccagctgtgtcctgagggttagactccactgccaatgttcacaggatctggagctgatgggaacctgcggtgtcaccctgaagggacagatggcccccaggctagcaggaggtggcagtgtccgtttggcagcaacatttgacaagcagaaggcagttggtccctcctgcttcctgtccaggctcttggggctgggaccccactcccagccctgtcctccccaacctccccacacttacacaggccactctggggcagaggaggggtgctgtgatttgtgggtttgggagaagttggaagcataatgggtcaggcctgcagctcggtccacactgcctgtgccaggtggagcaggtgagggcatccctggctctggggtggtgtcactgttcacactttgtcctatagccaggcccttcttgggggtgagggttccgtggagccctccatctgcctggctctgccgatccaactcttttctctctcttgggggtttcaaacttagacaggaataggggtgtcatttattgggccccagacaacctgaccaggtccctcagagcactgaggccgggaggaggagggtggaaggagatgggaagagtttcctttgtcctctctccctggccatccccaaacctccacacaaacctggggtggctgagcattcattatgctttgtctttgtaaataggcagctataaaaacctatcagcttgcagcaccttctccataacacaggctggatggatttataacccaggtcccctccccgagagaagctggcaaagcagaccccagcccgcgctggctgccatcaccctccctgcccctgccccacctcatgcaagaaacagaagggaaagcacattgagttgtaatatgttttcgatggaatttgtcacaataagaaactggattttgttggggctcatgggatgtttaggaaagagccagagagtggtgcaagctgtgggccgtgccgagaagcctgggctacaggagggcaggggctggagtgttggcagggtcgcacagtggctcatctggacagtccacagcggatccagcccacactgtgtcaggcactttgctgggactgggggatgtggctgtgggtacgattgacaaggtctgtgtcctgaggagcccgcagagcagatgagatggacatgtggtcagtgatggtaccgtgtcgggtggaagagacaataggctgagctgcccagagcatcgcctgaccagcttgggtggtggcacgtccaggagggcttcctggaagaagtgaatttattcaacacatgttcactagagccagtgatgcttaggcactgagagtgttgccagggatacaggagagaatgggagagtccctgagtcattccagactgtggggctgaagtgtccgccgatggaggtgtgggaagggcacagcggcttcccacgtgagcaaggagctatgcaatgtggcaggtggcagggccaggcggaggtgcctccacctgtctccagaccccaccccctacccaggtatggaattgttgtctccagttggcagagaaggaaactgaaatgggggtttcacctctcaggaatgggtaggccaggattttaacccaggcctgcagacaccaaatctatccctcgctcaggcctgcactgacctccgtgcacctctggggctccaggcagctgcctgggtgggtgctgtgtctggggtctctcctggcgttccttaggcccctcccctatcaccgtccttcattattcacttggatgccttgatggtcggggctggaaccccccgagctgacccaccatgcggctcatcttccttctccttccagtgcttggtgatcttgagagtgaggctgaaccgttgcttgatttttctgtgacccagatgaagagctgggtaaccatttgctcaataaagtgagagaccccatgttctggttaaagtggaggcactgaggaccagcgaggggaaggcagtacttgtatttgtcagcctggaggagacgccagataccagccagagcaccccagcctgtatctcgaccaccacctgcagttggtgctgaacccccccactccaccccatagatgagacaattgaagcccagagaggccaggcttcttgccgagggctgcacagccggcagggatgctggaattgggatttggccccagccttgtctgactccaaagccaatgctatttccaccatacccagtgtctcccagagctaattttgcggctggaactgcaacccgcaaagctatctaggacaggcaactcgatgaaagagaattaggagggaatcctagaaaaatggggctcggcagctcccggggaagcctggagaggaggtggcgccgaagcctctgccagcagattggggtggggctgttttcagtcctctctggcgaggtgttttgaagcctcctctgggaaccgtgtgcctctgtccaggactggctgtctctctggaaatcataccctggcagcatttggctttgggtgaaaggagaagagaagattctggccattcagagcaggcccttgtgcgggatggaacccattttccagaactcttgggacagggaccagggtggcaggcaggggcccgtggactgcctgggggacctggtgcttggggacttagagatttgttttcctgctgaatatattgctttctcgtgcctgctttgtgcaaccacgtgaggatgtgggggtgaggatggccgacaggacacgggagtccctcccgacaggggccaggcggcggcgggggtccgcatgtctcacgtcagcatggctctgtgttttcactcctctccagcacatatttagtggaaatgaactcattttattattaaaaattaaagtcatgcattcatagggtaaacaagattgagagcatgtggaggtgcactgtgaaagtgcagttctctcggaatgggcacttagagacgcgcctgttctctgcagctgccgcaggggtctcatcttgttgggacagaacacggttgattcatgcaattggctgttgatcaacatcaggttgtgtctagttttgtttttttcccgtttcgcacggtgctgcgaattcacagctgtgccagtgtatctgaaggtaaatcccacgagtgggccttggagagtcagaggatggggccttctacgtggacttggtgtggttgggtgtgtgatgcctgcgtggggctatgtgtttttagcccttccttctgacaggttctggaggcctcctctgtgcctgccagccatgcagccgctgagccgagcatcacccaaggcttgcctgaacctggcctgggtcccaaaggaacactgctctggggcatggaggttggctggttgagaactaaagccacatcagcaggggcactgcccccacctgctggggtcagcccccgcccggagttcagcaggacctccgtgagccttcgtgcaggtggctcattgcagcacgtccccttggggtggtggccattggcttgtggttcctttgctcactggggggaggaggacagccaggcacaggtgaaaggggcttgcgggtgacgattctagtccttggcccggggaatgtccctgggcttctgaggcctcacctccctgggtagtcaggagggttacgagggtggggcctggccctggggactccagggtgtggcagcagtgggagtgaggaaacagccctgagacggagggagagaagggcgatccagatggcggtggcctcctcacccctcggccagtgatgcatggtagtggttttgacgggctgacctcgagggtctgcctgggagccgcttggaactctctggaggtggggccggccctggtgggggcaggaaggtcccagagcagcttgttaagtgggctgaggacaagtgtcaggagacctgggtctggatcccgctccaatacccctctccgtgtgacctccaagggatccacctgccttggcctctcaaagtgctgggattacaggtgtgagccactgtgcccagcctgtgcccagtgtacccatcagtaaagcagggatcaaacagttcttaaatcctgcagcggtggtgagagccacctgaggaaacgatgcaaagggctttgacggagtctggcacagagaacgcacccaataaatgactgccgtgacgatctttcttctcgccctcaggtggtctctggaagctcctctgtgcggggttttctcatttgccagctgtgcatcccccggtcgtagtgcggctcccacgggggtgtaccaggagcctctgctcctcctatgcttcctgaaaaagggcccagagaatatttccatcaggaataactgagtgaatcccagaaacttcctatcacatttagggtgattaggcagatgcatacgattctcactgtgggaaaggagctggcgacctcgatgggttgtggttcccgcagggatgtgcttgcgctgctgttactccagccgtagctgaggcacgggagaaaacggagaccccgagaagttcagaggcttgtgcaggtcacgctgttcctacgaggtagaccctgactttgaccccaggctgtgtccctgccaagcttggagcctctttctcaaaagggcgacggaaggatgttgttacagatgtggttgccagtttcctccttttcattaaatcaccagggaaatggtctcttgcaacccccctaaagcagggggaaggaggaggacaaaggtcaggtcaccatctttgctggcatgtgagtggggtgggggtgggggtggggagctaggagacctggcgctgggcccttgaaatatccacatttccacaacattctgggtgtcagtgagcccctgccttcctccctcacatttatccggagctcttcctccgcagggaagaacaacagcccgagatggggttatttcaaggggatttccatggaaacgggagggtgggaggttcctcccagcacttgtataatgggagttggctgaggtggcagcgtgtccccacggaagggtgcgagggaccttctctgcaccgcaggcctcctcagagtgggaggcaccgacccgagagtggctggctcccctttcatgctcccaccctctctacccagctcaagaccccggggctccttggtgagagtgagagccaggccagctccccagggacccccaaggcctggtccttcccatggtctcttttctctagcaggtctttgtcttgggctgctgccagccacagcttcctggcaggacctcctggcaggacctctgtgctttgagccgctgttgctctgccaagaccttgccccgcaccgtggtctgaatcagcccagcaccccttcgcctctgttgcagtgctcacatttatccctcactcctccatccagcatgttttgtttttttttttttacaagcagacactttgctttataaaagaattctgctgtgagctgccgtatcctctctgagcctcccttttgtcatctgctgaatggtaacagcagcgcctgccatgcctgcttggtgaggattccatcaagcagggagacagtgggccgttggcggggagtctgagcaggtgtaccagtatttccagtcagctgatggctgatggacatgttcttggaggcagggaactcggaggcctgcagacgtgccccaggatgacaagattcatcagttcctacaagccctgcctgggcctcatgcttttcagtgtgtcctgggctttcccgtgtgaaatcttacctgatttttatgccaccttgagaagagtgatattcatctccgttgtacagatgaggaaactgaggctcagggaggcaacgtgatctttgcaaggatccgtctgttccccccgtggcctggctgcccctcctggcagtgcaggtggagttaaaaccatacaggagttaaaatgagcctcgatgggggtgggaagctacgactggaaaacgtccgatgctctcccaagtcaaattgtgcttggtgtctgtgggtgtgtcggtgtgggggagggaagctcagcccttttgaaaagtggggggtggtttgacgacgctgcaggggcagctccgagttctagagtctcagaacgtggttctaggcggttcatgtggatcaagtgctgttctgagcactttaatatccagcgtgaccataaggataagtgccactgttactggctttttcacagatgaggaaactgaggcacagagggattaggtaaagtgactggagtcactcagccaggatgtgaatcacagcccacacccatgtgcaccaggaagccttggctttcagggtccttggagggtgtgccgggcagtcgcctaagctgggaaaccttgggcttgtctccaggccatgtggccatgtgagataggagtcctcctgtgttatgttctgcgacactgtgggcagagggctgaggaccccagccctcccttagaacatcatgttggtgtgagacatttagagccaggcctccctgcttagaaagcacctcttgggtcacttgcattagtgaagttatacatttgaaactccatttatttatttatttatttagagacagggtctctccttgtcacccagactagagtaccgtggtgccatcatagctcactgcagcctcaaactcctagactcaagtgatccccctgccggggcctcccagagtgctggcattacaggcatgggccacagcacctggctgaaactcccttttcatgaaaagaaacagcttcaactttgcaatctcatctgtctgtctatgaggctgtgcctttgtgtgagatgagagcagtcactgtcacttgctctttgaatatttgattaacaggtaaacagcctgaaatccatttgacatcttatccttttgcaaacttggctaaattctcttaaattggttccagttggattaattaaatgcatggttgcttatacatgtgtgtggaaatgattctggcaggtcatgtcttagctagatagtgaacataagcgtctagaatattctcagctgttgcagagactgccaggaatgaccttgaaaaagtttgggagagggtttttttttttgtttttattttgcttttgttgagacagggtctcactctgtcacctaggctggagtgcagtgatgtgatctcagctcactgtaacctctgcctcccaggctcaagcggtcctcctgcctcagcctcccgagtagctgggactacaggcaggcaccaacatacccggctaatttttgtattttttttttgtagagttggggtctcaccatgttgcccagactgatctggaacccctaggctgaagggatccacctgccttggcctctcaaagtgctgggattataggcgtgagccactgtgcccaggctggagaggtttttggatgcactgggccatggatgtgaaggtgaacacatggaaacgatccctgccacctgcttgtgtgtccagtggacatgtctctgatctatccagattgttacactgtcaaagtgaaaactgctgagagtagagccatctgcctggccaggcatcgcttggaagcgtgaagacactttgcctttttgtctcatgattctctctccatgtgcagcttcgttggcttaaaagaaattaagaaactgggcccccgcttaggacctgctgaagtgcagagttactgtctttgaagtggtggggtagggaaaaataggaaataaggggtctgatcattttgagaaacctcagggagatttacacctgggctgtgcgaggaccccggagagtggcagagtgtatttggaatttccagtagtcctcattcctcccttaatatccaggggatctggggcctcagtcttcttatctgttaaatgggacaagtaacgactaggctttggggttgtcaggaagactgaataagaaaatgggtatgaaaacagtggtcacggtgcctggccctccatccctgtctccaccaggcctacctgtctggcccaggcctccctgatctccgcgggagcagacctcctgtaatggtgtcaaaggacccttgttctatttatccatctgatttccattttcggggccactgcctctagccatgttaggcacatggtgagtgtctgtcccatcaatccttgtcgattctgtggtcctgggtgggccatagcgtttctaacctgtccactctctcctaatcaggcatttggacctgtttgggttcccaaactctgtcacgggcagagggctgcaggaggctactcacgggccagggttgtttggacctggttgggtttccaagctctctcgcagtcagggggctgcaagaggctacacatgggccagggttgggctgctgggctgctgggctgctgctgtgttggagctgcctagcacttgcttcgttgctgcacctgagaggctgtgtgggctgagacagccagaaaagatgcaccgggagccatctgtttgcagcccttggaccagatgctctgcaaggactccgggggggcggtggggtggggagggaatacatttgctgagcacccagcatctttcagagcctcagcacagccctacaagctgggcattgccatcatgtttatacggaccaggaacacgaggctcagagtgactgagtcactggtgacagtcacccagccaggaagtggcataggtggggcttgaacccagggcttcctgagtcccaggctagtgttctttgcctcaggctgctgaggttccagctgaatgttgcggcagagtgacttctgagaagtaccacggaagggggtgactcacgccggggtggtctggcttctctgcccagtgcctgaggacacccaggtccctctgcggccttggggctttacccagcgtctgcatggcatcccgcagcaccctgcctctggagcgcaccctgtgtgtatcctaaagtgcgctttgcctagaaaacctttctaatgaaactggtggaagatggagaagccaaattcagttttcagagatgacactaatcctattaaggttgatggggccagagcatgtgtggaattagtcctgccaggcggcggccgggcacctgcctggaaggctggaggggatcctaacaagagtggtgccgaggagagagagggaaggggcctcatctctcccagaggtttaaaaaaactgaggccactgtagagcttggttctcccaggttcctggggtggaaaacagggcttcccacagcagacggaaatgggaggtgggcagtagtcaccgagcagggaggctgtgaagtagtcatttaggtcgggaaagtcacgcaagatctccaagcttcagtctccttagctgtgatggggggaatgggtgccccccttgggcgacttgtgggacccagaactcatcacgcagagcgtcccactgctgtgcagccactagctgctcggtgctggggctgtggtatgagcatggactctggagtcagaattcctgccttcaaagccccactcctcaccttgctagctgtgtggcctggggtgagttgcgtaacctctccatgcctcagttccttcatctatgaaatggggagactgaaactgtaccccacaccctaggggtgttggaacttaagtgagttaattcatataaaacacggagtgagtgcctggtacgcaggaagtgctcagttcctcttggtgcctgtgattattcccataatcatcactggtgtcaccttgtcgcctctcccagcccttggggccatgctatttgtggtaggaaatggggcctgaaaccatcaaactaaactggactgaatgatcagtccaccgaccaccacagtcacggcttggtggccccacggactgaagcacgtggccaagggcagttttcccttctctgtgtgggttccactgggtccaagtacattgttcctaagcccaggcctctggccactcacccacctcctgctgagagcgggcagagctgatgcccctctctgggcagaatcagcccacggctgggaggggaggccaggcctgctgctgggggtgcagatagtggggagctgcaggccagccactggaaacctggcctgtgtgctgagacagcacattggacacagtctggtggccttcccatagatcaggccacagagtcctcatcctgggtccacccaaggcactggccatttccagatcaaagagcaggtggattccagggtgagacggtcctctctgctggctgccttcccccacccacggacaccgtttggctttgatggggctgtgtcctaggcttgacccaggtggtcaggagccttccactatgcagtgggatatgctgcaggagtagggcggagaaggaagggaatggccggtggtgaacagctgccatgccccaggcatttaattttgaccgcagtgctggggggccatacccagtaatacagatgaaggactgagactcaagggtcagtgcttgctcagagacccacagtgaagagtggggccatcgtgttgcatgtgtgtggctgggccccatcccctcctttctacagcaccacccctctattccttatcaagttcacctttaaggctcctttgcccctcactggggcagtcatgagaggagcagaggcctcggatctgggcatggatgagggtagagccctggctgtgtcctgcaggtgacacgtacagagcagaaggtgatgctggaaccatccgccagggaagggctgtccaggaagaggtcacagcctgaacagaggcgaggtggagagagagtgctcgtgtgtggggactggtggcagctcaggagggcaagactgtgacttgcaggctgggaaccagggaggctgcaggtgatggaggccccatggggctcatggggcgggctgaggagcgtggctcctcccctgcagctggaggggccaggaagggctttaagccatggagtgagggaccagagttgggtttagaagggtcactgtggtgtcggtgtggaggggcttgaagggaggagtttggagggaggggctgtagcaatgttgagattccctaatcactttagtgttttcatgcatgagggccctgaggtgcttttttccagagcctgcactgaggttccctgttggcggcttccctcaggctgctggaacccccttttcctgtgcacctgcagagctggaggttactggaaactcatgtcctctgccagagtcagccctcacccagtcactgacaggtgcagtggtataaataccccagctccctccctcctgatcaggacactttgagatgggacctacactgtccccagagctcccatgggactgagctcaagtcgcactccttgagatttttcctgttatcacaccccacttggcctccttcatgtcctggccccacttccctacacccttcctggctttcccagcaacacttcctaatcacttccagaaaaatgttggcctcagggtctgcttctggagaacccagcctagcagagggcagcaaaggtgttgaggcactaggagaaacatggtgagatacagactcaggcggcgtccatcagctatgccaggaggctctgagacgtgccagtcagggagggaggtgctgaggccacagcaaaccgggggccagaagtaagcaccacagacagcaccaaggctgccagggtccatcatcttgggtctcccaattggttgggtccagagaccagcctgctggcgtttacggagccagcatgttacatctctctgtgtccccactgctgaaagcctctggtcagtgccatggtgctgagggagcttgggcctcccttagaggttgctaagagcccccaacacctgccctgtgagttgttggccccaggggactctgagtttccctgtttctggttttcctgctcatgggattgggagtctgacctgagcttgctgagacagataactgatcattcagatacaaaactctaaaggttagaactcttttctgataacttaaatagaaaatgaattcatgcaacatgtactcatctgtccatctgcgcacgcatccaacatgtatgtatctcagttgattgctgattccatgccaggccttggggatctagagatggcttggtccctatggtcatacccatgtgaagggagatagaggtggacagaaagacaaccataatgtcattttgacaaattctgggaaaagatgggccacccagcctgtgagacctgtatgtagtgatggagggatggggaacggtggaggtgtcagggaagctccccaggggagctgttccttgaggtggttttaagagcttagcaagagttttctacgcagtgaagtgaagacgtagggcaggtggagtggagggttggcacctaaaggtcctgaaaaggaatggtgttgcaagaggcagcaaatagcatggggtgggctaagctccagctggttgagtttgggtcagaagtgtggacttggttggtaaggactcctgagagtgtcatgtccaggcacttggacttgatgctgaaaatacagccattcaacagagaagtatgtatgtctgagtgtgatgtggttagatctttagtttaggaagacctctctgttcatggtggggagagtggatgagatgggggtggactggaggcagaagagcagaggagaagagcagactttctaggagacgaagcgggaggggctgctcccagggcctggctgtgagtggtactgaccagagccatccatcagcccagatcatgtctccctaatttagaagaaaatgagaggaaagagccttttcatctctgcctcttctgggatggaaatgagctattttgaatcacgctaaagttagatttctagttttccttttaatccgtgtctcatttagagcattagaaactggaaaagcacccccgtatgaatgtagtgtcataaatcagtgcacgtcacaaactgcagaaggagtcatttctacaagagtgtgcagccttgcatttatgataaatctaatgctttatctttttgggcttcagactagagtaattagtcatttctgctgatactggcaaaccattgcatgtgcagtgttaatggagagcaaatgtatttgaactgcttttgcaattgcttgtgagcattgctgtgtatctcttctacctgtttctagaggggaaacatcctatatatttcattcttgcctattctaggaataggtgtggtaatagtatcaggtaacacttactgggtttcttccacatctctggcactgttcagagattcaataagaaaggatcctttgtccaaatggaagctgccgtgtgtgtgttgaggtccttgggtcaatctgatcatgctctgtctcctgctctgtgcccgcactgtgtcagggaacacctggataccactcatgtattattcacctaataggtttctttaaatgttggccctctaccataaatggaaaaccagcaaatcaggccaaaaatagaagtaaccaaagacaagcgcaggtgtttctgctctaatgaaatagagacatcctgagaaacttctcattctgcaaaatcccaaacaaatgacatcagagctgatggacagaatggggttgggacagatgactggaagtctatgcagtgtgtcaccagacactcataaaaatattaagttttagaaaaatctggcacaatgaaagaaaaacatattaattcctgttaaagaaacattccaaccattatacaatcttatcttgaaggaaaaagtgaaggtcatttaatggaaggggctgaaagggagggagctgaattatggctgggacatggcctgggtacagagggagacccgtccaccaaactcttccaaactgagctaagaggtaggtgcgcagggaatgagtctattctcttgggccacattcctttgaggcttgatgttcagccattagtgtattttgcattcagttgcttcctctggctggcacaaaacattaacacactgagaaaggctgcgtttgaaccaacctaacttttacattatactgacatcattcccctatgtacaaattgcatacgacctactttgcaaaggcaatggtcatagtaactgtacgatggtgagtggggttgttaaatgcagaccagatactgctgtaatagggctgtgactcaggactatcattccagttgcctgatatgaaaaaggacatgaaggagaaggttttatgagaactctggcaaagacccatgaaaccactcttctttgccctccagaaaacctggtaaaactgaaagtaagccagcagccccacgggtttgggattgatccagaagactgaaggaataaaaacaagctaatatatttctatcccctcccttctaaggcctgtagttggttccattatgatgagacagcagccgatgcacgtaaaaacagaggccatgcatctacacaggggtgttgaggattgaatgagattaggtctgaaagaacacacagtggagacagtgttgtcattgtggggacaaagatttcttttcacaatttgagtgacacttgtcatttctataggcagttaagagacaataactgcatactgttggccgctgtacctttcctgtgcactgagtccctgagcatattcgtgagtctttaaaagtacattctagtcaatgtagaaaacagatagtaagggacatgactctacctagattaagctcagttttgaagcagggcctagaggatttagaagtgacagagtcctggattaggtgacatttgataagagctctgtccctaacttcctcttaattctggacaagccactccccgctctggctgtagttcccccatctttaaaatgaaacagttgaatcagacaactacaaaaggacttgccaggccttctgtctcagatcctgtgttgttgaagggatgtctgaggccagagatgcagtttacttctgagcaattacagttgtatttcttgtgttcagcctagccctttaccaagctttgttgaagaaatggagcaagatccttgtcctttgcttcggtggtttttaaaacttggatgcctaaagaaaccaggaaggtcatatcagtgagcaaagtacaaaatgtataagcaagacacagtgcaccatgacgctgagagtggcaaagtaacagtccaaccatgcatcagggagtggtggggactgtggcgtgctggcaagcatagccttgtgggattctgcattggacagctcttacaatttctggagagaaatcagaaattcaggtctacatgttgaatcttttaatattgaaatgttcacttggcaatgtgtaaacatcatttgggtcaaagcccatctgtgaaccaagttagtcaaagacaactgggcatttggacctcagctttatagtctatataagggttggtaaactatggcccacatgctaatctgacccacctcctgtttttgtgaataaagtttaaatgaagatgcagtcacacctatgtgtttaggtattgcctgtggctactttcacactacaacagcagggttgagtagttgtgacggtagttgagacagtgtggccctgtatttattctctggacctttatggaaaaaggttgctgacccttggttcatgtcaatgactcatatggagcagcaggaaacattctgaatttggagctgaatgaccagggtttgacgcctggctcagggaactctagtaacagagtagagagtgtttctcttttctccttttggaaatgatcctgaagcaacaaatggaacaaatggaaatgcaaatgccatctttgatggaaccatagcttctggaacctcatatgtggggaagtgcagtaaaggtcaaaaatgggtgcaggatgtctccaaagggaaataaaatgcccatggctgtaaagctcagacagagcaaacaaagcagaattttctacaccttctgtggtgggctcagatggcaagacctatagttcctctcatggagcaataagaacaagtgcattggctggtgtcttagtctgttcatgctgctatagcagaataccatagattgggtggcttgtaagcagcatacttttatctctcacagttctggaggctgggaagtctgatacccaggtgtaacagatttggtgtctgctgaggacctgttttcttgttcatagatggtgccttcttgctgtgtgcttgcgtggcagaaggggctagggagctctctgagatctcttttataagggtactaatcccattcatgagcactccaccctctaagacctaatcagttctgaaagacgttacttcctaagaccatcacattgggggctaagatttctatatatgaatttcggggggacacacattcagaccataacaactggtgtgggagccttcccagatctagttttgcacaaagtgaaatcagggaagtctggggtgaacaaggtctcacatggacaagctatattttcaaaaagcagtctactagagaggcaaagtggagaaaaggggctgtgttatgtgccagcctgtggcatctgatcttaacaagaaagaagtaaaggccaaaagaactgactctcactcacaagcctgttttctaagaactagattactcttttggacactctggtgcacgaatcttgtataaatagatggttcaggaagaactcatcacattcagagatgagtaataattagtaaggaccagtgcaagctctatctcaagatcctccaaaaatgaagaaagtaacagatgaaaaatatgcgcaagaaaacatttgccataaatcagatgaaaatatcaactgtacataatgccttggactaaggaaaaaaataattgagcaatcacacctctaaacaagagtataaagttgagatacaagaactcaggagaggtggtaacatgacagaagagagtgaaacctgatatgatgagctccacaaagtagatagattaacaaataaacccatctaaaaagtgaagtatgcaatggaatgattatgacagggaacacagaaaacacagtaagagatatggaagatgagattgggaaaagcaagataaattaatgtaaagagagagagagaaatattagaacatgatgcagaggacagataaggggatccaacatacacataattggtgtccctggagataagaatgaaaataattaaataaaaaaaatttaaggcacaattccagaactttctaaaaataagatttgaatttatggactgaaaggaaatacagtgagtggctgagaaaatattgatatggtgaggtcaacagaaagacatagagaagtactaatttcctcataaatcaagaacccccaaaaaaattcaatagaagaatggataaaggatgtgatgaggagatggtttacataaaaggaaatagaaatatcttttaaacacataaaaactcaacctcactcataataagaaaactccaagttaagatactgtttttttatctatcgtataggcaaggactaaaatagctgatattaccatgatggtgcaggtatgagggaaacaagaactctcagaaacatggctatggatttcacttctaatccttgtctgatggaagtacacaagtaagaggccaggtgtggtggctcatgcctgtaatcccagcactttgggaggccgagattggcagatcacttgaggtgaggagtttgacaccagactggccagcatcacgaaaccccatctctactaaaactacaaaaattagccaggcgtggtggtgcatgcctgtaattttaggtacttgggaggctgaggcacgagaatcgcttgaacccaggaggtggaagttgcagtgagccgagatcacgccactgcactctagcctgggtgacagtgtgagactctgtctccaaaaaaaaaaaaaaaagaaaagaaaaaagaaatacgcaggtgagaaatgacatttatccacatttgtcatagcattgttggtaatgggaaagaatggaaatatctgtaatggccatcacaggggactgtttacataaattattccagagcgtgatagtggatagcaatgaaaagaacgtgacagctcagggtgcgctgatgtagaatgatgtttaagattctttaggtgaaatgagcaaggtgcaaaatagtggatgatccatgacatgctttatgattaaaacatggtatcttatgactgcttgtgtgtagactccttctggtaggatgatgcacctgaaagtgctcatagtggttgccactagacaggagagctgagtgagtgggagaagggcctaagggagacttattttcactgttagcttttttgtgccctttgcattttatactcatttcttaaccaaaggctgcacagcttaggttgtgaccataagctctagagtcagctgttcgagttcgaaccctgactgggctgcctactcgctgtgtgaccttggacaagttacttcacctctgtgggtctcagagttgtcagatggatgtaacaatggtgcctgtttcataagttgttgaggatgaactgagtcaattcaagggaaagaatgaggacagaacctggcacaaaaaaatacagtcaaattagctattatagtgactgcatgtatagttgaacccagggtctggatttggaacccgtatgcctattggcccaatgggggggatgacttggccacagaacagccacagccaggcagtaaagggcacagggagggggccttagcctggggcttcagggaagctgcccaggggaagtgatgctgctgggtcttacagaatgatgggaaaacttggcggcaccgtttcaggcgacgctacttagatctgcaaaactgttgatgtcttacaataccaagtgtagggcggggctggagaaatggaaactcatgccaccactggaaatggatatgaaagcaaaccatttgcaaagtcatttgccaatatccagatatgtccaagcagcccctctgttccccttctaggtaaatagcagggaagccttcagctgtgcacagagagccattcagcaacagagcagaccctcgaacaacacggggttgggggagccaaccccctgcacagtcaaaaacccacatacaacttttgactccccaaaaacttaactaatagcctcctcttgattggacttccaaaaacatgaacagttgataaacatacattttgtatgttatatgtattatatactgtattctaataaagtaagctagaggaaagaaaacatcattaagaaaatcataaggaagaggaaatatattttctgttcattaagtggaaggggatcactataatctttatcctcgttgtcttcatgttgagtaggctgaggagaaggaagaggacgggttggtcttgcagtctcaggggtagcagaggcgaaagaaaatcatgtataagtgaccctcacagctcagctcatgtttgagggtcaactgtattctaaaatccaagaggctctgaaagcctaaagattttttcctaacttatttggcagtgaaacccaacctaaattgatgtgaaaccatttatagcccttctctatccctgtagtgtgaagtttcatatgttatgtacagaaatagaaatgcgtatgcgtgttgtcccagaagcccttgggggtgacagatgtcctaggtgacctgtgcaccatattactgtacagtccaaatcctctatcctgaaatactgggcccaccctttgggatttgggagatgacagtgaagctggtgtgtgttcagggaattccaggttgttgaaggtgctggagtagaggggagagggggaaacgaggcagcaggcgctgggtcccgacggtccttggacacctactgaggatgtgggtacaacacttgtttcatccctggggctcagagatgtctgctgaatcagtcgaggggccttcagtccactgtgagccccagaaggcagagctgtggcctcctccgacttgtttctcagaaaggtcacttgggcagcaggtgaacatggctcaggagaggcaagggagggtggggacaggtaggaagcagaagccacttactgggcaaagaccatagccatgaggatggggagggactgagtagccagagaggcgctcatcaaagcctactgctgtcatctgaaggtctggtttctcccaaattcgtatattgaaattaagccttaaggtgatgcgttaagaggtggggcctttgggaggtggtcaggtcatgaagatggagccctcatttatgggatcagtggctttataaagggaccccacagtgagaagatggccatctatgaactatgaagaggccctccccagacactgaagcttctacacctcgatcttggacttcccagcctctagaactgtgagatgtaaatggctgttgttataagccccccgagtctgtagtattctgtgggagcagccccaaatgactaagtccacggcccatcctccacccactgaggccataccactgggaagggtatcagaggcagggttggggtcttagaggtccagggtctcttgtccaggctccccagaggcaggccccgaggtgtggactagagtataagtggtttatcaaggaagtgtacccaggggaggtccagatacaagtaggaggggctcaagcacagaggagccagggaagggggggctctggaccgaaaccatgtcccctccacagctttggacttagccccttggggacacagacgtggctggggatgggtcacaaagtaaccagggtgactgccagcctgaactctgggctctccagacttctggggaccgtagtctcagcctgagcagctttctccaaggagggtcctggaaacctggggcctgcccctgattttgtcctgggagcagggcccctccatggtgttctggagcccctcatattagcttttgaggttgattgcttaattttcagtttggagagccagcagacatcttgttggtagtttgaaattggccagggcaggggtatttataccatggaagctggcaggggctgccttccagaacctctctccctccaggtgcagggaaacacggacctgcacaccctggtggctttcacaccttcccctcctcaggcggctcgtccccttgctcagttatactgatccttgggcttgcaggcagaaccatctctgtcatccagaatctccctagtaaccccaaccccaaaagtgggctgccggaagaggcagatggcagtgtcccagggctatggaagccactgataaacatcttccaacaaacaggatcagggatctgcaaagttttttttttgttgttgttgttgtttttttgagacagagtcttgctctgtcgcccaggctggagtgcagtggtgcgatcttggctcactgcaacctccgcctcctgggttcaagtgattctcctgcctcagcctcacaagtagctgggattacaggtgcctaccaccacaactggctaatttttgtgtttttagtggaggcggtgtttcaccatgttggccaggctggtctggaactcctgacctcatgtgatccacccgccttggccccccaaagtgctaggattacaggtgtgagccaccgtgcccggctggatctgcaaagctgttgaaaggaggagtggataggattacaaagttggcctgattctgctaaatgaacatttcaacatgtttcccctcgtgcaccgaggaggcgtgcactctcctctgagggtctgaggctttcttcacggagactttgtaaaccacttctccccagcactctggagtgggggagtcacgtagggaagtcatttctctcctcttggacctctcagtcccctttggcttctcgctgataccaggcagtcaggtggatcagagaagacatggactctggagctggatgtctggtgcaggcagtgtggcttcaggcaacttgctttgcctctctgggcctcagcttcctcctggaaaatcatgatgctcatacctagggtttcatgggggtcaggcaggacagtgcaggtgcaggtatgagcaccatcccatcaaggacatagtcctggctgctttcagtgatcttggtgctggggaaaatggggctgattctcatggaagaggaaatggattcatgtgcccacttcttaaatggaaattcaaggccttgatcgtggcccacttatgaggtggggactagtgaggcttcaggtggtgtcctaagattagaaaactggagcattcagttgggagtcagacctctgctgatgtgctgtgtgacgttgggcaaggtgtgtgacttctctgggccttgtgttcagtagaagcaggtcatctttcaatagacctccttcccagaccctctcggatgctgtgggcatccagctggcccccatgccacacctggcttctcggggactggcctgcattctcacacccgttctttctggcaacgatgggcatttgtttctcccctgccagcaaactcctttggaccaagaattgatgccatggtgttagcatacaataaagcttcaaggagctggtgaaacactctgagacggtcataaaattggcttttcatccctgtcggagctttcttattacagacaacaagcagtgtcagggagcagcacggtagatgctgcttaacccagcagcaggcgagactgagggggtctcgtgctgtttgtcaccaccgcctctctgagatcatccccaacccatactgttgacattcactgggatacctggctacctgttttgggtttccttacaattttttcatttgtttaatagtttttatttttcaaagtcttaaaaaacacaagtcagtgaaagttttggtctttgttactgtcttcctaccaggtacgagggcctgaaagtcactgttaattgattattgattatctgattagaaccgtacatttactttttaaggaaatgtgaaaaataagcctagaaatgaaatcaaaagtgcggtgttgaagttagaaatggcagcgtcacggtcaggaattaaagctgctgcttctctgtcacatggtataccacagggggtggtagctacagcccatgggcaaaacttggcccagtgcctgtctttgtaaataaagtttgattggaacagagtcatgcccatgtatctacacatggcatgtatctacacattgtctgtggatgcctttctgctataatggcagaggtgcagagttgccaaagaggacatatgtcccacgaagcctaaaatattggctatctggccctttgcagaaagaatttgctgacccttggtatagaggaaagttagtggcacaagtttagatcgcctatagtgaaagaccttgcaggaccaggagtcaggcagacctgggttcgaaacccgctctgccacttcctggttgtgacttcaagctgcttgccttttcctctcagggttctgtttctgtctctgtcaaatgcagccaaatactgcccagtttgcacagctgtttttggagacagagacactcagcaaggggtccagcccctggtgggtggtatcccaatgtcactgttggcatttgcagtgtcagtgatgtctggcttattcatcaggccctcttgagtttgccccaaacgagtcaaccctccagggctgtgaaacttctgctgccttgatacgatgtgatttccgaaccagaaaaatggaggaggccctggcccctaatgcttaagtcacgggtgactctgtgcaattggtttcttccctgtctcctgtccctctaaaaagaaccacctgagctcccggactgtgctatatccaggcctaaaggctggtggaccaggacacagtcaccagcaatcagctttcatcgacttggctggaccttggaaacttaaggcttgccctgccctggcttcttgcggtgagcaggtcttatggagttgctctaaccactgtccatccaggccggggttagaggatccaaacacagccatgttgacgggaacctggaggcaaatagagggcatgagaccctcctctcctgaaacctttctggccttcttattggatacccaccaaacagtcttgatcttaaaactttgtgcaaagcaataggatgaacttgtaggacatgcataaagaggaaggtatggattgtgacatgcggctcttagggatgctcctcctacagtgctgagtgaccctcctcagaggcacaggtgtgggcacagcttgttctttcaaatcctggcaccccagctgttctgctgtctagctcgttccctcattgacaaaacaggaataacagtgcccacctccttgggctgttaggggatcaactgagatgctaagtcatccaggagggggagcctctttcccagagtcctgcctgtgcccggtggctgtgcagacctgatacccgcagccatctacctctacacctcatgtgtgttagagaacaccactctgatttcagcctctcagactgggggttcagtcactggctgctaaaagcttcctaaagccaaggcctctccttgcctccaggggctccgtgtctgttagatgtgtaaacagatccatcaccgagcatactgatgagtcctggcctagggacaagcatggccacaagtgaggtgtctggaaagggctcacaggggaaggagccactgaggagggcaagaagaaggcttggccaggaagatggggtagggctcattcctggcaggtccagcctatgtgaagcccagagacccagtgaggggcttgcccatcctttggccttgctggagccaagggtgtgaaatgggagctgagagtaggatgttagtagcagtggcttcctgggaagggcccccacgtgggagcctctggcctggttgcaaatggcaggaccaaggaggtcgttgttgagttagttggaaggcactgtcctgccaggatttcccacgtcctcgtttgagcattgagatgctgaacgttaaactgtccttcattctccagctcagttcttttattcatccaacaaacacagagtagctactgtgtaccagatactattctaggcactgggcatacagtggggcccccagctcgtcctggcctcccagcccagtgggtgtggagcagtgagcaggaggacctcgagtgtcacacttgctccccttggtacacattggcacatggcgttgccaggtcagatattctcttcttggggttcaccagcatcccccttggatgtgccctccgtggtatgtggccgcttccatctcagtctcaggccgatggaagatattttcaaaattaacttagcttttggaattggttcctccccatgttggtgctcaaagactccccagtgagacagctgcctccttgagctctgtgtgcaaaacttggggagcaagacttgcttgagccagtgtttggcctggcccaagctgttgggcctgcagagcctcacctgcccctgtggctcagggcttggtgtctgaagtggatggaggcagctgaactggtttctccagggccccatccagcctgcgtttcccaggctgctgtcccagctctgctccacccaagtctactctgccgtcccctgatactgacactgagtgtgtttctgaacactgcagggggtgaggaataaggtgggcatattgtagcttcaggaggtgatgcttgtgtctgaaatacaaggaccacaattgccatgcaggtgtaaatatctccagtgattacacatttccctgcaccgaccgagtggctgcacccagtctggggctctgtctctcctggtcagtctgttcttcctgaagccaggaacacaggagggcaagtttctctccatccctagtcccaccctggagccagcacacagtaggctgcaggaagtgctcgtggaacaaacacaggcagcaatggaagaatccccaccactgggattttcagcagctgatcgtagaagggagctggactgcaaggccgtctccgaccgcctccctctcactgcccagctggctagggtgatgagtatggacgaggatggaggcaggctgtggctgctgtctcatccaagtagccttttcctgacaccccaaggctgggcagagggactgagttggtcccagggcggagcctgctgggaaggaaggctgttagccgctgccttgcaggtgccatagcaatgccaggcagcccacctgctccttggattagatgggggatcagagccatgagggaagcaggcctgtacccaggaacaggctcatcccgcccctgccctggcccggtactgatggacctggagccatagagtgcctctccccgcaacacacatgcacatgcatgcacgtgtgcatgcacacacatacaccacatacacaccacacacacacaccccacacatacacacataacacacacaccacacacacacacacacacacacagccaagcatcgattctgggccctgttctgtatgcacaccaattttcctgaacagactctccttgtcttctagcacccgggaggattcagaagtgtcctggctgccctgtggtgatggggatggcagggacctgcatttttgtgagttcctgcacgtgatgaaggggaaattgcaactgcccaggcagcctgtgcaaaaaggcagtgggtttcaagtgtggtcataaaccaaaagcctcaggttcacacgtcatgggggaggctgaggggaacacacagcctctgagctgtgctctcgggctgattctgagctcgtgctggtggggacacccccagacttccagcagcactggatgtccctggatcctcacatgactcatgaggaggggctggcatgttcctgaacttcaggtgttgactctgcagtgaggcgatttggatcagagagactgtgcaggtgcccaggacacacagcaggtgaggtgcacagccaggcttggctagcaattgggctcttaatgatgctcacactggacgtgtcagagtgcctgctcctgggcgtgcacagccttgtgggaggggccgacaggtggatagggaattatagggtggggggacagggagctgtgctggctgttgtggggacaccacagggaaggccccctgactctcatgttccagcattgccacttcctgtcatcctctcggcaaccctatatgaatgggaataggagtaagtgctctgtaaagactcctctggctgccaggcacgtgctaagctctttgcccacaccactcaggcattcttcatgatggccctaaaagtagagactcttgtgtccccattttacagagtaggaaagtgaaccctaaagaggctgcctgctgttctgtggccacacagctgggcagtggcggcattgggatttgaacccagaaactctggctgtacggtcttagccttggctcactctcacctccaagaaatagactctgagcagtgaggtgacgtgtcccaggtctcatgggggctgagggatctgggaagggtgatttgcccccacccctgcatctcccacacggtcccatccctgaacccttgcacacacggcccctctgcctccatgcccttcccctcactttgtcaaaccccagcagctgttcagcaggcacaccacagccgcctctggaggaggcattggctggtctcctgtgtcaatgtatcgacactgcctggcgaggtctggctctccggcctccctgtgtatccacaggtctccccagctctgcaatccctttagggcaggctcaggtcagtcatgctatggtcacccctcagtgccccgacatggctcagcagtgtccggtggcttgaatggaggaccacaaagtgtcctctctctgcagaggggccccaggtcatatctgctgacttagcaccgcctataagatttaaagaccattctgttttcacctggaggaaccgtcagctcacgcaggatggcaggtggttttccagggctccacagtgaggtctccagttcatcttttgatgagggtgatgatgggacagtggccctgaaagcacatggctctagagtgcttaggagcctggtgacctgctgctgtgacttcctctccagagctggagctccaggggctgaggttccccttccctgggcagccccttcctcctaatccggctttccctgtgaggaagagcctcctggccttaagccacatccttagcagcttctgccgtggcccttcctccagccggggaccctggcagaatgcatgggcaggaggaggtgccttggccccaggacagccaggtgggcagtgaatggacgaaatcagtctgtgcaggagggaaacactaacactaaccctaaccctaaccctaaccctaacacactctcaaaacatttgattctaacttaaaacacacaagggcactcctttccatggccctactacatgatctggcctgacctgcctttctggcctctgctcataccactacctccctgatctttcagttcctcaaacacaccaagctggttcctaccctctagctccctcccactgactcctcctcaccctgagatcctcctcagcttatcaaaaaaagattcccccattttctcacttcaaccctttgttcatttcctccaaagtactgtattacagttaatgattattttttgggtctgtttacctgtttgggcttcgcctccccagtggtatgtaagatctttaagggcagggtgcatgtgtgtttcttggtttccaaaatatccctagtgggggccgggtgtggtggctaatgcctataatcccagcactttgggaggctgaggtgggtggatcacttgaggtcaggggttcgagaccagcctggccaatgtggtgaaacctcgtctctactaaaaacacaaaaattagctgggcgtggtggtgtgcacctgtagtcccagctacttgggaggctgaggcaggagaattgcttgaatccgggaggcagaggttgcagtgagccgagattgcaccactgcactccagcctgggtgacagagtgagactgtcttgaaacaaacaaacaaaaaactaaaacaagaaaacccccaaaatatctccagtgggtagcacagagcctgacacacagtaggtctgcatgaatatttgttgaaggaatgaaacagtgcctggatgagtgtattgcagccccttccaggtagggcacagccatcggggagccagcgtgacagatgtgagtgctgtggccctgggatgcgatgacaaccccttctcactggggtgtaccctggattgggttggtgcatgtagaatatatggcatgctgctggcacttggcaggtgctctgtcaaggttagttgttgttacttaaaaactctaatcaagtaagcatgacatatactgaggtcctactgtgttactgttatgggctgaattgtgtctgctccaaaactcacatgttgaagtcctaacccccagcacctcagaatgtgactgtgttttgagacagggttttcacagaggtacctaaggttaaactggatcattaaggtgggccctgatccaatatgactgtgtccttataagaagaggagattaggacagagacacacacagaaggacaactgtgtgaagacacagggagaagacagccatctgcaagccaggagagaggcttcagaagaaaccatcctgctgacaccttgatcttggacttccagctccagaactgtgaggaaatagatttcttttgtttaagtggcacagtctggggcactttgttatggtggcactagaaatgaatacagttaccaaatttaatttttcaagctctctctagcagcaaagtatttcccccatataaaaaaatgaggacgctgaggctcagagaggtgaactcgtttgccggagccacagggcttgctggcgggcgttggcactgatagttgaaccctggtccactagtgtgcctccagagatggtgcaggccacgccgtctgccttggtctcacgcaagtggcggctaagcccagaggcacttgtctccatttcagtgccctgctattggctggttagaaagtcaatattttatggagcctcatcaacctcccaagtcttgggtctcaattcccccttttggtgtgagcctctgaagactggttgagcatttgtgagaaacaaagttttgactactcaagactctagttaaaaaaaaaaaaaattgcaccaatgtgccatccggctgcagcgtctcaggggcatgattcggtttttgcaacagggagtagctcttcttgaaacattatgggatttctttcctaagttgacttcacttacattctgctcagcacatgcaaagcatttggttatcgggaggcagagtaagatgacaaccctattattgaaggtaagcagacctggcctgttcacaaagccctttttacatcttatttcattctgttaccaacagggtaactgtgaagtgggtgggcaggaactgtgacttcttttcaagtctcagaagatgtcagtcccccagggaggctgggcctccgagtgccagtgcaggtggctccccctcggccgtcctatgccacgtgccctctcctcgtcattctcagccccctcgcgtctggagtcacctcgctggtttatcgtcttgtggtccatctgcccgtgagcattccagccaggtctgtgggcttcgttttcacggccgccattttggctgcccgcagagtgcctggtgcaaagcggatgacactcagtatctagagcggcacttccgggtaatccacaaacacttatcaaacacttaggtgtcacttggggtgctcggaattgcaaacatgaggacaaaccctcactccatttggggcctgcagattcagcaagagtggaaaaaccagctttttaaaatggcagcctgggaatcccagaagtaggaagcacaagcttgtctttggcaggccaggccagctgctgacccgcacggccttcaggggccagccagtgcgaccatgattgaatgcacagccctgactcctttgtggcattggctcctgggtccaggtgggagcatctgattggcccccactggtcatgtgctaaccaggaagtggtgtgtgatgggctgagcctagggctcatacctgcatgtgttttgggggaaacagagagaaaggtgtggcctctccacttctgtggacaccccaaataggaagaagggtgcacacaaagcaccgcttcctccacgaagccctcctcaggcacatcgaggagaaccagctgcccaagctcttggctgctgcccttctgaggcctgcctggtaggtggcgtaggaggaggcttggtaagcagatgatgggacatcatctaccacatcccatcagtaacatccaacaagtgtgtgtgccagcacagacctgggcactggcatgtcccagccgtcattccatgtcaaatacttatctgtgccgtcatcgtcgaggtctggtttccaactctatggctccattgtctcatgtttaaccagtcctcttactgggcatcagcttttccatttttgctctgtgagaggttgttgagttagttggaggaccaagcccataatttcctggatgacagttcgtgtcccgcagatagagcttaaccaacagtggttccctttccagacctaagcaggtgggagtcagagatgagcatagagaaagggtgaaggggtgcctctggattcccaaggcagggacatagctgggggagctgcctccggactcgcaaggcgggggtgtggcagacactttgcagaaaaagtacatctgtccttggggcgagaggccgcacatgcagccccaagtccctggacctgtgagatcctggctgcctgctgttgatagaacgggacaggtggggggatgcttttgattcatgtacggtgaatgatcttattctcacctttatcactggtggcacattctgatggaaggagacattggcagtgggactgggcaagaaacaggtcatttgtcatggctgtgtgccagcctcctgtcgttgcacagcctgtccttgggaagtcttgctcacctgtcatgtggagtagttgtatgtgtgtgagtgtgtgtgtgactgagagagacatacacatatgcacacacacgcagaagtgtctgtacctctgagaatatagttctccagaggatgcagaaaaattggggattgcagactgtcgtgcgtttaaatgtgtccttctctcaagaataatgtccacttggaacctcagaatgtgaccttatttggaaatagggttcttgtgtatgtcactagttaagatgaggtcatattggattcgagtgggcctcaagtccaatggctggtgtccttctaaggagaggacacacagagacacagggagaggaaggccgtgtgatgacagaggcagagattggggtgatttatctacacaccagaagccaggagggagtcagggagcggctcctccctcagagcttccagagggagccaggcctgcccacgctgtgatgtcacattcctggcctccagaactaggagaggataaagttcgattgttttccagctgtctgtgtgtagtaatatgttacagcagccacaggacactgatacccagacacatcccaggccctaacatcccagaagaggagtccctgatactcctcttttgcaaaatgaggtgtgggctcagagcaagttcgattttctgtgaagggcctgatagtagatattttagactttgcaggctgtgtaaatctctgttgcatatttttcttttcttttctcttcttttcttttcttttctttctttttttagacagagtctcactctgtcgcctaggagtgcagtggcagtggcaccatctcagctcactgcaaccactgcctcccgggttcaagcgattctcctgccttagcctcccgagtagctgggattacaggcacatgccaccacgcttgcctaatttttgtgtgtgtgtgtttttagtagagatggggtttcaccacgttggccaggctggtctcgaactccctacctcaggtgatccgcctgcctcagcctcccaaagtgctaggatctgttgcacatttttctttgtttgttttgttgtcatttgtttgttgtttgtttcacaaccctttgaaaatgcagaaaacattcttagctcttgggctgggtgtcactgagtttgccctaggggaaccctcaccgcatgcgaagctgagtgggcacggtttcctccgctgtcaacgggaatattgatggtttccctgagtgaggacccaggggaagcactgggctggtgcccgcctcctgtctctgtgcccaggcctactgtctgcttcacactttactccccagaaccaggcatgacacttagtacagggcaggccgagctcgggggagatttgcttgaagaatgaggaacgtttctggaagcctctctgaccacccagcaggcaggggcaggtcttcctctgagacccaagtcctctatgcttccctccatcctagcagtgacttccatgacacaccattgtccctttgggagcacaggactctggctgagtcatctctgaagtgaggtgaacccagcacagggactgatggcttgggaagagcagctcagcctatgtggggggtgttgagggtgcccaggcccaggggcgatttgatcccaccctaccctagcgcagccagaatgctggggccgaggttcacctgggagatgcaggagtttagagaagaggaggaggatgtttaagcgtgcgagctggtgataggagcgtggagttggagctagacccagacttgaattctggctttgctgcgtggcagcagctgtgtggcccttgatgagtgtcttaaccttgctgggctttggcttcctctccaggagggcatagcaagtcctgcctgttagggccatcctgaggatggggtgaccagagcatgagcagccgggtgcccagggcacctgggcaacagccctgtgggtaggtgggtctgaatggttgagccccacgttttagtcaagaccactctccttgcagagcagttcatgtccacttgcccacatccttcctgtcccagcaccgtctgtaggttgctatgatcaccccattttacagatgaggaagcacatgcccaaagaagcaagtgacttcccaaggcggcaaggcaaggtgaggggcagaatgaggaccccaacccagttctccccaccccctccttcccttccagagcccctgcctgctggaggcattgtcccagcggcagagggtcaggccacatctgccagagctaaggggagtctccgtcatctcaaatcattgggtcaaatgacagaaatctgctggcatgctgccttttgaggctcggcgacttctctgaggctttcctgatggctgctctgggtgtctggaatgagctgtggacgagggccgtcctctgagtgaccatgccccccacgcagccgaggttcccctctgcctggctcagtgcgggttctgagaaagcctgcctgccctcactggaggcacctctgactcactgctgcaaggatgtggccatggactggggtccccgggggcccccgaaagcctcagcaggagaacatgtttatccagaagcctgggcaacacccagagggtcctggcatgggtgtgccaggcagactgggcatggaaacatgccccgtgatgtctttgggatcctgggagcctgaggcttgttctcagtgtgtagggcaggggctgggtgccacccaaggggggcaaactgaggtcacagagagggaggcagtacccccagaaaaggtgattcttctcattggaagattcccaaggcccaaggcctgggtcagcagacagtggaacaagggtaatggtcatgtccttaattcacgtaaccccgaggtgggtccctgtgaaaatcccgtggatggggcctggtgatggctacacttatattctcagaagcagcattaccacctggacccttcccttttctcttactccctcctcctcgtggggtctgcaagggggtctggtaaatggcatccccctccccgcccaggggctggacccgtggagcataagccaaaaggggcggcaaagagagacacggaacctcactgccactgcccagctgccggtgctgcaggacctggcttaggttcaggggcccggtgggcttccccagtgctggaccccagcaggcaggtgtggagggagcagggggtagtggagcagagtacagtggcccctggctgttctcccccaggaagagaggagaggcggggctggactctttcccatctccctccccaatactccagcgtcagtcagtctccccccgacagggggaagggagagaggccaggagccttcccctggggcacacacagggagcccagcaggcttggaagaagtgtctccctcctcctccagccctgccagatggtcccagccctcctgcagggttcccgaagtggaaggatctggactcagagcccagtgctgctgcttggcatctgtggtcccgggctggagggcgtgttggcagctcatgcctggccagcgcatcggggtggctgcagcagaggatgggggaggggagcagggacaagaggagcctgcaggctgctgggtgcagccagggcttctgcttcaccccgggggtcacagctgctttctgttgggaaagctcccactggaggtatggggtaggcagtgctggagaccctggtggcaagtgctgagctggggcacaggtgaggatcaggaggagctgggagggacatccgcaggttgtgctgatggactgcctctgagtattttcacgggatggtggaaagaggccttgagtcagacctgggttcgaatcctggctcctactcttggtagcagtgtgactttatgtgacctttctgaacctcagttttctctgttgtaaaatggggaaaaccacacatcgtgggggcggttgtgtgcacctaaggaagccaccccagggctgggcacacgggtagccgattgtcatatccttgttatggaaggttgttatccttgttaggctggtgggcaggggtggtagaggagtaggttgtttttggaaaatggtggacttagtcttagacatgttgtgtttaaattgctcatgagaaatccaaatagaaagacccagggtgacagcagggactgctaggaacttgggataaaaaattggtcctggggtgctggtcactgatcctgtggataaaggagttggggtgctctgtttgggtccagctggcagagttggaccagttgagagaaacttctaggaggaaggtttagaagaagaatgctttcaccatcagagctatcttaatagctgtgtaatgtggtagtgagctccccatcgtaggaggtatgtgagtcatggctggaggactacttggaggtctgttgtagaaggattcagacaccagagagggttagactggatgaccttcagttcccctcctgggtgaccacagctcttcaaagcccctcactgctgcccgcttctgcaggattcagggttgaatgtcagaagtctgctggaatgctgtcgattgaggcacggtgacttggccaagcctttcctggtggctgctctggtatctggaatgagctatgggtgagggccgtcctctgagtgaccgtgcccccctcacagctgaggttcccctcggcctggatcagcgtgggttctgagaaagcctgcttgccctgactggaggcacctggaggtggttttcaaagtgtcactgtcaccgtgacccagacatgcttgagccccaggctgggaaagctttttttctttgctttaaaaaagcagaaacagtgaagcaagcataaatttgcctttgaaataagaggctaaatgtctgccaaatgcaaatggattgaaacggccggtggtctgaccttgggatgttccattggtagtttcagaggggctctgagcccccaggccggctgtaacagtggacatgctggcgctggccagtttgatccctttgaaagccccccgatattcacctccaagagagaaggccctggcaggtcctccagcatgcggacgaggcgcatgcactgtgaggcagcggctctgtgggaggacggggccttttgtccactgtcctggcattccatggccctgtgtccccagatatccgcacctgttcctgacaccatcccttcctgtcgtgtgagcgagatgctcttctgtggaacctgggttcctatggtcactgggagggtgaccctgagttcacagagaaaggggagcaggctgttcaggaaaactaagcacatgtggtgagcatccacaggcggctagggatggaaggcttttcatccgggctttcagatgaggcccctgaagctcagaggggttaggcaattggcctgaggttgcacagccaggaaggagtgatggcgtagtgattcccattgggctctcccaccccctgttcctccctccatccagcccagggcctcgtggatacattaggagcccaacaagagttcccctcccttctcccttgcttctctgagcctcggtttccccatccatataccaggaggaaccccctgcccatctcgtagggctctttgacatggtgaaatgagatccagatactggctgtctgtgtcaactgtaaagtgctgtcctgagtgaccagttgttgttggtgcctgtagccatccttgaggctaaaagagactgctgcttgcctgatgctcctcccgccagcctcctgctttctgcgtgacttccctcgccccagcaatgaaccctggagccacctgcaaatgggaaagctcttttgttagtttccacagaatgcccaccgtgcacatgatcagagagtttgcgagcctagctcaggtcagtggaactggttcctttcgtacatgtaggaagtaatgcagggtgctgccgaataaatccactgcctgcctggcctctgatgaacttaccagctcacgccagttctagctccagccagttctagctccagccaggaggaggaaaaaggcatactaggccgtattttgtttctttcaatgtttatttacctgtacacacacacacacacacacacacacacacacacacacacacacacatacacaggcaaaacttatgttactgtcccatgcataattctctagatttgggccacatagatctggttttggccattgactggcaacatggcagtagccaactgcagagccaccagggagcagcctcattctgattgagtataacgaagacgctgatgggaaagagagacacgggtgagcaggggctgtggggcatcatgagagttgggagggtccccatcgtggagctggccagccctgagtgggagccccggcacagtcctctgctagctgtggcctttggccagtctccacttctcagagtctcagtgaccccagctgccaccaccaggattgttggggtgtccaagaatgaaaataggggtcatccctggccctcaggggatatgtgggctttcccctcatcatgaatggaacaggtgagtgctgtggtgcaggctgagaggcggcagggtgttctctcacagcagggtcgggtcttgctctgataactgcaccaggacaaacatccccagcctctgggatgcacacccaccagcatctgcccggcaggtttaattaccggctgagatgggttgtgttgggctcactaagtatgctccataagtgatgaaattgggcaagttctcacctctggaggctctgaccccgagtagctttgaccctgagtagctgaaggaacaggcagttcagcctctgcttatgggctgtgtgtgcacacatgcacgagtatgagagtgtgtcagtgtgtatcgtgtgaatatgtgtgcaggtaagtgtccatgcatatgtgtaagtacatgacaatgtgtgtgcgagtacatgactgtgtgtttgtatgtacaactgtgtgtgcacatgtatgtccgagcacattggcgtgtgtgtgaatgtgagtgtgagagcgtgtgatttcatgactgtacatgttcactctgtttattctcgggggaaatagcaggcaatctgtaagaaaatgactgtgtaagtttcatgggtggaggcttatgatactgttagagtctatcttagtctgttggtgctgccataacaaagataccatagactgggtgattcataaacaacagaaacatttctaacagttctagagctgggaagtccaagatgaaggtgccagcagtttcggtgtctgttgaaggccgtatgcctggttcacaggtggcgacttcctgttgtgtcctcacatgggggaaggggcaagggagcttttgtaggcccttcttctaagggcactaatcccattcatgggggctccaccctcatgacctcatgacctcccaaaggccccacctcctaacaccattatcttggggttagggttccaacatatgaatttgaggggacacagccattccatctgtgaccgtcctcaatcagccttctccctgcagggctgcaaatgagggtgctgccggattcataagagaagatacattgtaacatccacagcacacaggcactaggttgggagccttttccagcactcagatcagggttcaaaccctaactgtgcccttcaggagctgtgtgacttgggcattccttcattttttattcaagcacacagctggcatctacatgcctgctgtgtgtcagggagatagaaatagaggggtgagcccctgtgatattaggcaggcagctttcccttccagggtctcatttttctcactggtgaaatgagggcaggggctcctcccctggggttactttgaggggtcagtaaggtgaacagttacagtctcttgcacagcccctgaacgttgtttagaagtcaatactctgttccatcccatcagcttcctcttcccttgttttgactggcaaatagtcatcaccttctgaagtcattaagagaaggtctttttaaactattatgatgccatcaaaactgacttttgatccaaaatatcttttaaacaagctgaccattcagtgaggatttgccaggctcctttgtgatccatccttttggggccagggtctgtggggcccagagctggacatcatggaactagctctgaggagctcatgttcaggtgggacacagtctcctggaatcacagttctaagcactttccaactattaactcatttaatcgttaattactaccatttcccagatgatgcaccagggatgttaagtaaccaaggaatatggcagggccactgggatagtgggctgttagaaaagtcagggtggaggccgggcgcggtggctcatgcctataatcctagcactttgggaggccgaggtgggcggatcacgaggtcaggagattgagaccatcctggctaacacagtgaaaccccgtctctactaaaaatacaaaaaattagccaggtgtggtggcgggcgcctgtagtcccagctactcaggaggctgaggcaggagaatggcgtgagcccaggaggcggagcttgcagtgagctgagattgcgccactgcactccagcctgggccatagagcaagactccctctcaaaaaaaaaaaaaaaagaaatgaaaagtcagggtggagtacagacacaaattagagaacttaagaggcaccaacaagagtatgggcagtatagggagaaatggaattagcacggagcaggggcttcctagggaggaatgatgggaggagacacctccttcctgctgctcctgctgtgtgccagcctgggctgggagcgtcacgccatcagctccagtattcattccagccctgtgaggctggcagcagggtcctcctagtggggctgaaaggtgcaatggtgaggaggaggattgcaggggctggagtcctggccccaccacttcctggctgtgtgactgtgggcacgttactcaccctctctggccctccatttattcatcattaaaatgggattaggggccaggtactggtggctcacacctgtaatccaagccctttgggaggctgaggtgggtagatcacttgagctcaggagttcaagaccagcctgggcaacatggtgaaactccatctctacaaaaaatacacaaattagccaggtgtggtggcatgcgcctgtagtcccagctacttggtggggctgaggtgggaggattgcttgaacctgggagggttgaagctgcagtgagcagagatcgcaccaccgcacttcatcctgggtgacagagtgagactctgtctaataaataaataaataaataaataaataaataaataaataaataaaacagggggaatagtagtccctactccatagggctgttgtgaagatctagtgagatcaatgttcatgaaggactttggcgctgcacacgtttctgagaaagggtgacctggccaggctcactggggtggtaagtggcagggatgggcttctccacgtctcccctgtgatattaggcaggtgtatgcagttgcttcacgtccagccacaccccctcacacacctgcagaccagccagcatggcacaccagacacatttctgctgcacctttccccacacagtacctaccacctggcgtgcctctctgcccatccccatctttttgatattttaccttccacctaaatccgaactgaaatcccagacctcactagctggtgggtgcatggggtctctgctctgccacttctggagctgctcctagtgcatgccccagttactcactcgtggccaccaccccccgagtcaggggtcgagagtcccctttgtccatgatgggtgacgagggcatacccggaacagagggctaattaaatcacacgctgaggtttgtagaacatgggacgcttcattaggctctgtgtgaacaagtgcgcccagcctgctcccactactccagcagactcgagcctggtataatcacagctcacactctgcttcatcagctcgctgaggctgtggggagggctcacacctttgggctctaaagagagtgggcctgaggtgtgggatcctgcttctgagcaggggtgtctgccccgagccagcttgcccagtggtgtggagctggagccccctctgcttaagtaaaggcctctgagggacacatgtcatgcagatgatgacaccagactggctcctcactttaaactctacttcctgagagcagaaggcagggaaggcctcagttggaggtgaaaatggaactttcatccaccagatgttagataaaagataggaagggtgttccaggcagaggggaaagtctgggcaaaggcttggaggataaaagggcaccgcatgtttggggagcggggcatgttccctggggccagagacctgagttctcctcttggctctatccccagctccacccatgacttggggtgagtcctgaaccccgaccaaccttagtgtctccagggctgggatatgggggggtggcagcctctgatctgtggtcacagggagtctcagctgtggtgctcctgtgcctccctcttgctactctctggccagtgacgatggcactttactctcctgcagagacctgtccccagtgcctgcctcctccagtcctcttcctcatgggctggctgctctgggcacatctcagggcagccccagaaggtgggctgagctgttatttggggcgtggggttctcggttcctccgctccatgctggtgggcctggtgcctggcaccactggcccgtcttccaggaagctcactgacaccatcctggatgggccttgttttctctctggcctgggagtcagctgcactctcgcaggtcctaggccaaggtgacctgcttgtttcattcttgtctttctcctttgctttatggtatatttttaagcataagatatatttatttgtaaaataaaagttcattataaaatgatgccttaattaccttcctgcaatataacaattatttggttgtatagttcctgttctccgtattttgtgtaataaaatggacccaatgggtgctgcacaatgctgggtgccacagggaacacacactgctgttttctcctggatttttaaaattttaattccagcatggtccttttatatgtgctttcactctagctgtttgcctacatctccacagttttgattgtccagggtggtgaataaaatgcaacacttggcatcttttaatgtttaaaaaaatcaacaagtattttatttaaaataaaatgtgaatatctgtaatcctaaaaaaaaaaaaaaaaaagccacaggatccttgagaggccctctgagacagtgacacccctgaccagctgcagccccctgtccactccccaggctccattctctctacccactgcctctgcatcctccgcccttggagtttctcagggtgccccgcagatcacctgtggcccaagtgctcagggacttgtttaaaattcagattcccaggccccgcccaggcttgcaggcagccagggccaaggaatccaaatactaatcaagcccactgtaattgccctgcatctgaggtctgaaatcactcgcctgctctggattatctgtgctccagggtggcctcagtttacaccatcctacctccccattgaaaccttactgctcacgatggcccaggttcccacccatcctgggagagaaagatgattggctcagttctctgggaggcctggtgattggctgcctctaggagggtgtggctacctcttgatccaatcagtggagggcagcatggggatgtgatcatgcagtgaagaacctgtaccgggggtagttaggcgccagggaaggggaggaggagaaaccagttctactgttagtatcagctcatctaacatttggcccctggtgggggtttttgcatccttttgggggtctaggtctcttctgccattttgttggcactttaatttcttgttaacaaacccaagagcacatacaacttaatttttaaattcccaataatttccagcatcctctaagttagtgctgagcgatagaaatgtaacggaagctgtacgtgtagttttaaaacttctgatagccaggttatgcacgtaaaaagaaacaggtgaaattaattgtaataatttgtatatccaaaatagtataaactgtaatcaatctaaagtaattgagacattttacattctgtttttcatattaaatctttaaaattcggtgtgtgttttatgcttaccatacatcccagctcagactagccacatttcaagggttcattagccacccatggctggtggtccctgtactggatagcgcagcactaaatgatggctttactttgtatccttggggaagtatgtatttttgaatccattttcctcacttttgaatagtttaagaacttcccagtccatttgtctaagggtatttgacttctaaatgttgggtttcttggccgggctcagtggcttacacctgtaatcccagcctttgggaggccgaggtatgcggatcacttgaggtcaggagtttgagaccagcctggccaacatggtgaaaccccgtctctactaaaaatacaaaaaaaataattagccgggtgtggtggcgggtgcctgttgtcccagctacttgggaggctgaagctggagaatcgcttgaacccagcaggcgaggttgcagtgagctgagatcgtgccaccgcactccagcctgggcagcagagtgagactccatctgaaaaacaaacaaacaaaaaaaccagttgggtttctagcaataaatgctcataaaatctgctggagttttggaggattagtccattcatcctgacttgtgtcctgtttctgctgggtcattgttgacttcccccacttgcctcacacttgtaaggccatgtggcacaccatcaacattcatctctgattaaggagcttgtttcttgtagtggctgccataacatattatcacacgtttggttgtttaaacagcagaaacttacactcttcctgttctacagtccagaagtccaaaatcatggtgtccgtaggcctacgttccctctgtagcctgcaggggtggatccttccttctctagaggctgccagcatctcttggctttatggccacattactctaagttctgcttcggtttttacatcacctcctcctctttcccccatgtcttctcctctgtgtgtctcttataaagccacttgccactgcatttagggcttactcagataattcagaatgatcttctcatctcagaatccttaattatgtcttcaaagaccctttttccaaataaggtcacattcacaagttccagggattagagtgtggacataccttttgttttttattttattttatttaatgtatttatttatttttgagacagagtttttccctgtttccctggctggagtgcagtggtgcgatctcggctcactgcagcctccgcctcccaggttcaatggattctcctgcctcagcctcccgagtagctgagattacaggtgcgtgccaccatacccagctattttttttttggctttttctttagtagagacagggttttcatccaacagatgttagataaaatgttgcccaggctggtctcgaactcctgggctcaagcgatctacccgcattgggctcccaaagtgctgggattacaggcgtgagccctgcaccctgccaagagtgtgtacatatcttttgtggggcaccattcaacccattgcagtgaggtgtcagtgttttgacaggaagaagcagcaaagaagacaaatcagcactttatttttctaagctttgaaattcttaaaatgatagtgggttaagaaagaccaacttccccatggaaggtgctggtccacactggctgggtttagatccctttggctgaggtttagatccctttggaggggagtcaatttgaagaagaagcacatcagacacattcaggaaggcaaacccaaagacagcagaaaggcaagaatgtctcaaattgttcaaaaataaatacgttagttcttgtaacgtgctccgaatagggtgaggctcaacatgagcacttaataaatgctcagtttaattgtggtaattgtaattctcattggtatatatttatgtcctgatcctatacctctgttattaatgagactgataataggtaagtgaagggaaaaagagacccccctgctgccaggaaacaaaacaaagtatcgagccaaatgccaaatccataagtcaccaagatgggttttgatgacaaaacctttctttctggactccccctgcccctccgcgaagccgttccccatggccacgcttgtccgtggctggctttataggcccatccttcttttatatgatcatcaagatggcactaatttgggtttgcaaatgaggttttcgtgatgttgtcatgtcagcatctggattcaagaggggctgcttcccagaccctgaccctcccctgtggcctgggagcaggcccagcccctccctccatctaatcactccccaggaacctgggggatttgctaatgggcccaggaagccataaagagtaatgaaagtgctgtgtgactgctctgcacggggttgcccttggggtcccttcctcataattaaattcggaatcctccttctgcctttgagctggaagagagggttttatcctccctgtggtctgttcatcccttcttccccccattcatttgttcagcacttattatccagttatttgtttatcaagccacagttgaatgcctgctgagagccggtttagggcactgagcttcctgttctcaacaggcagaggtgggagcagccaggctgctgtgggaagagcagagtggctatggagccgccctgagccagctctgctgtgcgggagttctgcgacctggggaacccgctcgcttggcttcctcatctgtaaaacggggagactaatataatagcagctaccttccaggggggctgtgagaattaaaggggacgatggatataaactcccacacactgtcgggcacagggcgttaatagcagccctcagtctcatgtcccacttattttgtgcccgacacacttctgagcatcttatgtctattcactcatttaatttgcccagtaactctaggaaggaggtcacgtccatggttcttattttgctgatgaggcagttgaggtaggcagaggtgcggtgccttgctcaagatggcacagtggaaggacacggggcagggcggacctgaccgcagttggccctcccttgcctgcctcttagcacgcatgcagccccctcgcctgctctgcccgttgtgtctcagaatctccactgccatttgcgggtgccctgaatccacctcgcttttccgtgcctccctgcttttgtgcttggtgcagacccctgcttcctcatgggcacctgcctccttagaaccccccttggaatctgttaactacagcttcctgggcccacaccagcatccctctgcaactcagaatttccagggcccataatttcctacaggcccctcgggtgattgctttctcagtaggcaacttagggccgtccctccaaacctttagagtgagaagcgtgctacctgggtgcttcataactgatgttgcaaatgttcaaccaagtgtaggaagtgaacacactttgtatctgcaaagtgctgtgcatacaagcgaggtcaggagcagctggcacccgtccccaagggtttccatgcctctggcgagatagggtaggagtatctgcaagtagctgccttcttggccatggaagaacaagttcaacagggcgcctctgtgtgcctgccccttgctgtgtacaaggaccttgcacttcagggacatcaaggcaccttcagccgggctttggggaacttgtgtatgggagggggggacctctaaggacctttcctgtcccaaggagctccccagaagcctgttgcagtgcccagcaccccagcctcatggttaaggtaggcagtccccaggagtccccttcctgggacatcaactctcctggtgggaacaaatgctgagcacctcagcatgagatgggtacagtcagggactccacaggcaggtcatgtcacagacaaggtcacacagctaggtggtggcaggttggagagagagggcagtcccctgactcccatcccagtgctcttttctcccatgacagtgacgggtgaaatggcacagtgtatccctgtcaggcaggaggggatttgttgtacttttttttttttttttctgaggcggagtttcactctgtcacccaggctggagtgcagcggcgcaatctctgcacactgcaacctccgcctcccaggttcaagcgattctcctgcctcagcctcctgagtagctgggattacaggcacccaccaccacgcccagctaacttttgtatttttagtagaggcggggtttcaccatgttggccaggctggtcttgaactcctgacctcaaatgatccccctgcctcgtcctcccaggttgtatttttaatcctccacaactaaatactcatgtcagtggaaaggttccaagctctttaaagacagcctctgccagcgtgctcccaggggaggccagggaaggctttgggaagcctccgtgggggtggggacctcctgcaacccctggcgcacagcctcaccccgctgtaaacagagctgggattgaagtgcgatttcggtttctttttctttttttctaatcaaataaaaacacctagggggcaggaagcgaggaggaagaggccagggagtaattcttgttgccaaaccagtttctaaggggctccgctccgctcccagcatttctgtctctgaggctccgacctctgagatgatcaatcctcccatttcagccagatgagaattgctgtgggccctgccttttcttaatattttgcatgagagcgacagcccggccagcggcagtaatctcccacccacgtggggaggcacccactgtcctgccatgtgcataattgaagtcttcagactgctcagtggttctaattagcccaaagtggccccttctggcctcagtggaaattactgccctcctgccgcctggtcttactagctgatctttgaaggtgtgagtgagccgggagacgtgcagagcctagcactccctctgctgcattggtctttcttggcaggccttcatggctttgcagagggcgggcagttgaggcctctgtctgccgttgaggtcctgcctccctcctctctgccaccactctccatgggacaggtgctccagctgggcgcatgcatgcccctctcacctgaatgcctcccactagcagtgtctctgctctttctgacccttcaggttatgcagtgcctcctcctccaggaagtcatccctgatccccaggctgggccctcagaatccccatgtctccctccatcgcagccctggccatgccatgtggtgcttgtttacatccatgactgccccatgagactgggagcccctagggggcagaagccgctccatgtcccacctactcctggcctagcgcggtcccataggacatgtctacggaaatggagggcgtgagggtgggaggaaggaaggaaggcaagaaggaaagaaggaaggagaaggaaaaaggagaagagagaaaagagggagggtgggcaggtagcaccatgcccattttgcaggtgagaacactgaggagacataaccgggaagtggcagggccaagcacacccttggcagctcattatactttcccttcagcctagcaaagctactgttcgatttggggaaatggggccgcttgtatgaagagccgcaggcaaagtggaaagtgccgagggctggaagtcagatgggtgtgggtgcgcagccttcctgtgtacctgtgggcaccacttacctgctctgtgaccctgagcagggcacctttgccttcgaaacttgaagatcacagtcgtccaggtggattcaaggcgatgaacagcaacagcgcatgctcttcccaaacagtattcttcttatcctcactgaagccccagaaggtagttgatccttaccacatcattaacctcaatgcgcagatgaggatgccaaagcacagagaggttgagcaactggcccaaagtcacacagtgcgtgagtgacagagccaggatttgcgcctgggttcttggctctgatattagtgccattgactccactctgttgtgtgaggtatgaaggcatccagtacagtgtctggcatcggcaggtagcttccatggcagataccccccctctcccaccagattctgccctttgagcgacaggaagataaatagcgctgttctccagtgtcacttgtgactttcctctgtgagttcattgtcagggtgctcctgagctgagctgtggccaccactcattggtgtggtccctggagacacttggataaaattgtgatgacagagggctctcaggctcatgagatcacacagaggagggtggagctcaaagggctatctcagaccgggatgctccagaggttaggtcttggtgctgtgtttggcccccagctgctctttcaggccttggtcttgcccttgcccttggtctctggaaggctgaatagctgcatcttgttcatctggaaactctctgggatgagtgactttagcatctcggatgttgccatcgtagcccatgtgcataacaacttattgtgcaagcatgtacagtcatattgaaaataaatgtagaagtgaaggaggcagtccaaagacggttcctgacaatactcggaaacagcttcattaggtattggccagagcttctatttgtgggttgctttggcgaaactgcttccttaccattaaccatatccaggagatggaggggaaagtcttcacctgggttggtttttctcagaggggcaggcaagctgaataacgggagtactaacatttccaagaagattaatgattaaaatgttgaatacaatttgagacttgttttcatgttcatattttatagtccagaagttctttctataatgtcctcataaatattttatttggccttaggttaaatgtcagtttccatgtcctgccacgtgccacttgaccaacgtgtgtgggaacgtctctactttggacacactgtctatatgaatggaggcccttctaccccttgaaatgttcctcaactcccagctcagtttcccttccgcatccctttgactgcatgagcggaagcgaggcattacagagaggtttgaggagccagccagcaagctagcaacggcttcagttcatttctgagatgtttgcattcaggggtcccattggccaaccttaacttctcctttgagctctaggcatcttgtgatgaatggcataagccttagaacatgggagaggcttggatgggccaggagctccaaacactaaggaatgttgcttacatcaatagacgccttagttacttaggtcaatagataccttagttgcttagatcaatagatgccttagtagatcaaacacccaaatcacccaatgtacttttagggcaatggttgccaaactttttggtcttaggacccctttttacactcttaaaaattattgtggctcccaaagaggttttgtgtatgtgggctatatccttcaatatttgccaactttgaaattaaaactcagacagttaaaaagatttatatgaattcattgaaaaataaaaagtgtaaacccattacatgttaacgtaaataatattttttttggaaaataactgtgttttgttttaaaaagtgagaagagtggcgtgtgtatcaatctctttaatctctagcttaatagatgatggttggattctcacatcagctcctgcattcagtctgttgtgatacattgtttggttgaggtattgtcgaacatctatcctcaaacagatatgtagttggaaaagggagaaccccacaatcccctgaaaacgtcttggggtcccctggaggtacttagaccacagtcttagaactgctgatttaggtgatgggtgaaactcaagatgaagacaaaagagaaaacatttcaaccccaagagacttcaatgcattcacatgcattgactcaggatcattaaagctctaactgaacccaacatggagacagagcaggaaacacagccatggctggcttgacttcagcctcccatcaaagacccccatctttggctcaactgcccccagtggtttcaatcagccacagacttcccttgtccagctggactggacgttctgcatttgactgtctgtcggctgcccactgattttcaggctgctgaattacccattagctcacctgaacccctaatgccacatctaaacggtcctcactctgcctttctcagcatccgagaatgtcctataaaaggcttcttccatggaggtgggcagccttgggcctctcctagggtcagctcaggctgcccacgctggctatggcttcctgctggcccctggaagctgtgtacacctgggagagtgaggtgaatgttaatttattcagcatgcaattaatgaattctaccctgtgcctggcacgactcatttctcatgccaaagctagggtggatcagaccaccttggacaaatctggatgggtgaacttgtggattgatcaatgatcttagttgatgaaaaatgcaccaaatgactgtttcctttaatgcgattgcttgggtggtggactcgattacgttgaggggattaaattagcagcttgctgggtttcagatgagtgcaggtggctgctggcacttcctctcccctcttttctttctttcccttttactgcaaacgaagacttttcaaagctttactaagtacaataaatgccatccccttaaagtgtagacttccatattcttagaattggcaagctatgtatatgtttgtgaaatcacccccataattaagatttggagcatggccttcacccacaaaacgtttcctgttctctgtgtggtccattcctatctctgccctgcaccctgggtagccagtgatttgcctttggtcactgtaggatagtctgcactttcaagaatttcatatgaatagagtcatagatgcatgcattttttggtctggcttctttcactcagtgtgggtattttgaacttccccctggttgctgtgtgtgtcaatgatttgttcctttttctttgaggagaattctgttctgtgaatatgccatgatttatttattccttcccctgctgatgaatatttgagttttttctaattctgagctactgtgcagaaagctgctatgaacacgtacgtatgcacctttgtgagtttgtgagctttcgtgactcttggttacaaggatggttggttcgcatggtagacccgtgcttattttcacgctttaagaaactgccttgctgtttcccacggggctctatcgtttttcattcccccagcagtgtgtgaggggctgtttgctccacctcttcaccaactccatattattagtctttttaatgttcgccactctgatgggtgtacactggtatctcgttgtgatttgcatctgcgtcttgtgatgactgatgatgttaagccccttgccatgtgcttcctgaccattcttgtattttggtttgggaagtgtctgcccaaatcttttgcctattttaaatcaggttgcttgtgtttatattattgagctgtaagaggtctttatacatccgggctacaagaggtttactagatacatgtactacgaatattttctctcattccatgccttgccattttcttttcataacagtttctttcacatagcaaaggtttaagctttgataaagttcagtttgtccattttttgttgtttttcatgctttttgtgtcttgagaaatcgaagttgcaaggagtttcttctataatgtctcctagaaggctcatggttttagcttttatgtttaggtagatgatgcatttcaatgtcagtttgtcagatggtgtaagagttgatattcattttgcccccagtcatttattggaaagactgtgctttcctcgtggaatcacctgagtgcctttgatgacaatctgagttcaccacagacttgtgggtctagttctggattctctgtttagttgtattgatccacatgtctgtccttttaccaggaccacactgtctgtatcactgtatctttatatcagctggggtaaatcctccaactgtgttcctttatttatttatttattgcaaagtcattttggctattctaggtcttgttctaacaggaacatattttcgcttatttaatccttaggaccctctgaagcaggtgtgaatattaagcccattttatggataaggaaactgaggttcggagaggatgagtaactttcccaggtaactgaggaggaagtgagccttgcccctggtaggtctggcagctgcacttgcccttagcctctaggcaggctgcactgccctctctgtgggttccaaccattcctggtacacacccctagccaagaacttgtgaggttcttggaacctcatgcaagaggctcttgcatgaggcctcttttccaacttctgtttatcctgtcccaaagaggtcagtgagggacccccagggccgcctctgttccctcaccctgcaccttggccgggagacccccgcagcgcagggagcatccctccggatgtttcttcccaggcaacaatattctgtttatcaagccaggccccgaggctgaggcctccccctggcctggggtgatttttggttggtggtgagaagcagcaggggtgcctgggggcctggctgtcatcggagccagctccctgtcctggtctctgctgtgcgggatggcatgggtaggggctttgtgcaggatgagggtcctgccgactgggacgtgggctttggaagggccacgcttctcttacaggggtgcccttgtggctgtatgaggagtccaagctctgaggttgaacactgggattgaaggattcctgccagggtgcacttaggtggctcacttggcccagagtgagccagagctggctcgcatcagtgcgcgggagtcaatagttacatttttaggaattttttgagccagttgttaaactgtgggtagcatggaaatcagccctggcttgagtaggctcgcatcagtgcgcgggagtcaatagttacatttttaggaatgttttgagccagttgttaaactgtgggtagcatggaaatcagccctggcttgagtattcatgccacggacttggcaaatgccgcaaatcagggccttctctctaccccctcccagccccaacccgaagacctgattgttaactgcactggcaaacccctggctctgcctcctggagcctcaggttccttatctggaagcggggagaataatgcccacaccttaaggcatcatcaacacccttaaatgagatcatgggtatgaaatgcttgtgaatagttttgagtgtgatacgcaagtgtgaggggtgctcaccaccctggccattgccattgtcctcctcatggcagcagctggacaatgtgcccaggctgggagttggtgtctccaggaaaaactggaggaaaggagcccgataacccatgggcagcagctgggttagggagggctccagacctgcctatctccgtcagccctgctgaatgtgcctctgtttgctcatctttataatgggtgcactgatcccagctgagaggggtgtggtgggctttggggtacaggccacaaggtacaaggcatggcctgactgcagctccgtcactctcatggctcaggtgcatggctgtcccacagtggaaggaccaggggctggcctgatctgcacttcatggcatcaagagcacaggccctggagtccaccaggcacagagaagcagcctgctcctgggtggagtacaagttcaaccctcgggagttgtggtttccccatgtggaagctggcagcatgccacgcacctgccagggctgccgcgagggttcgcacacactgtgtgtaatgctcctgtgtgagttccccggtgacccaggtcccactggggtggccggcgtgtaaccaggacaggaacatctccaaagccactccttgtttgctgcctggtggctcaagcagaacatctgtgcctgcagggggcccataagccttaatgccctgcagagagggggcctgggggaggctgggactcacaccagctggggaacaaggcctgcagctggggggctaccaggatgctccttgccagtaaagagggtcctcaggagatcagccacagctcaatcaggagggtctgcccatttcacaggggaggaaagcgagcctctggaggctgagctgccagcagtcacggggccagcgcacagccagagctgaccactctgtatgactggcgggtctgcgcccttggcataccacagcagctctcacaccaacagaggctggacctgctgatcagcccccgctgtggggggtcccgcctctgcccacaccctaccccacaccttcacaggggtggactgtcaccctctagcagactgtcctccagagaccgagacacggagcctctccacaaggagggaggaaagggaggtggaaaccagccttaccctggacaccgggtggtccttgctgcatacccaaccctcattggtcagactggtctgggagggcctggacatgcccgcggggtccgtttctgaattcccgttgcctggcataagctctggcacttagtaggtcctcagttaatacttgtcagataaataaatggcctcctttggggaaatgaagaatgtccaggctggccacggggaaggggcagtgttaggagtggagagcgagagggtgagccaggcagatgggacctttattcaaagggcagtggggagccatggaaggttttagggagggccatcggatgaggttttcattttagaaaagtccttctggctgctgggtggatggggtcaagatgaagacaggaaatccagagaggaggcggctgcaggctcgcgggtgagaggtgaccatggccaggccagggcggaggcagggaggtgggcggaggggggctgctggctctgccaactgtgaccccagcacccagctcagggaattatggccagagacaaagcagcttagagcctgacccctgccctggagcagataggcctgggaagggggctgatggacacgctgatgtgatgggacctgagaggtgttcttgtcaccaggccagtttggcccccatcgcccgcctgccggctggggtctaaaaggctggctgtagccccagcagagaggacagggcctgtgggaccccaggtgctgggagcacagaagccagccaggccatctggcccggctgagactcaagtgataggtccgcatcagtgtcaggcctccatgccccccatcctgggatgggaacagcacatcacagtttgcagagccctgcggcaggggtgactcttattgccattttgcaaatgggaaaactgagacttagagtctctctgactcacataagcaggacaggagacagtcgaaccaggtcccccagctgcaatttaccacatctcaaacccttttcctctctctgtcattgattaatctttgcttcaatgtccacatagttctgtgatttgctttgggtacatagtagcaataattatagcaacaatttctagcagtttcttggtgccagacacttctgtctttgttgcctcgttgaatcttcaccatcaaccttgaatatgaaacccattttagagattaggaaactgaggctcagagactgtttataacttactgagaatcaggcagccccactgaggtgctttaccagtctcccctttaccagtggttctcaaaccttggcacaccacaggaaaacctgtcagaatgcagattctaggccccagcaattctggtcctgtccgtctgggcagagccttggcaagcttcgtctttaggagagaagcccaggtgactgggggtggggctttccggagcctgtgttgcaagaaggaaggcagggagcatgtgatcttctctcggtctccctcaccttgaccctgtcccaaggccagctgctggcctcaggctgcctggttgcctttgaaggtccatggggatccgatggagggttggtcgtgctgaagccaggctgggtgtcatcctggctctgagcacagtccagcctggctagagtcaaacccagcagcttgaccggatcctgctgaccacagacaaatccacaactaccccgtccacctcccccaggcccatctgcctctgtgccagccaggctggcagacactccatcgggcgggccccacctggcttggccagggagaaactggcagccacagcccctggcctccccgatccctgtcccttgtgcactgcccatgggaggggcagtggccttccacgctgggtctggctcctgcagtagcagagctgggtgcagacacgggttggaggccggggccatgggggcattcgtaggctcatgagtcccttctcactctcttctggggactgggtttctgctggaagagaaagggaccagccttaaaagacatcgtgattaaaatggaattattatttcagcctggaaaaggaatgatgtactgatctgtgtcacaacatggatgaaccttgaaaacattctgcgaagtggaagaagccaggcagaccccaaaggccacgtgctgctgtatgattctatttatgcaaaatatccagagtaggcaaaatccatagaaacaggaagtagatcagtgatttccgggggctggggagaggaggggatagggaatggctgccgacggatgtggggtttctttttggggtggtgggaatgttctgagtttctttttggggcggtgggaatgttctggcattagactgtggtgatggttctagaattctgtgaatctgttaaaatccaatcaagtgtacatttaaaagtggtgaatttcatgttatgtatattgtacctcaactttagaaatgctaaaatagaaacaacaaaatcatcatgatgcaacgcctttcctcatagacctggagcgaggcctgagagagaagccatataaggcagatgaggggtgggatggagagcttcctttcattcgctgcctgcccagtgagggtctgcttcctctggcacttacttaacaaacccgagagtcacccatgtgtgaggcatgggctgggcacagaagggtccacgcccacccctgaaagtgctcgtccatgctagaaagacagaaggatggggtggtcattgaacctaagtcagaccgtggcttcccagctcatgcagaataaaatgctcaggcctctcccggcctgctgggtgcaggaccccggcccagcccacctctctgagctctgagctcatgtcctgccccatccctctcacacgcacactggcctccttgctggcctgcaacagatcaaactcaccctacctcagggcctttgctcgtgctggtcacctgatatctgtgaggctccctctctcacatccttcaggtctctgctcaaatgcgtctcccccaggaagtcttccctggcctccccagctaaaacagcccctcccacccctcccatgccatttaccatactatagttttcatcttagcccttatatctccctccaagagctatttattgacatgaaaatttgcttattggctgtctctcccattcgagagtgggctttctctggggagtgtgcactgctgaatttccagtgtatgcaacagtgctgaggagagggtaggtgctcagttaatgctttttaattaaattttctattgtggtagaatatacatgacatagaatttaccatctgaaccatttttaaatgtacaatcaatgtcattaagtatattcacgttgctgtgcacctgtcaccaccatccatttctgggactttctcatcatcccagacagagactctgtacctgttaaacaagaactcgccattcattaatattcttttgaatgactaattgaatgactaagtgtatttcctgtgtgtcggtcacaagctaggtgatgagccagtaaacctggcgcctcggagggtgtgtgttcccgtatctgtctcggagatggacagatcgactcagagaggtgtgaagggctttgcccaaggtcacacagctggtcagggtgggattcaaacgcaggtctttccccctttccacacagtggcagttctgggggatcactgcatgcaaagggcatagccatggcacctccaggcctccagccccacccagggcttcccctgctgccgctcccccaagggtcactgtgtcggccacatgttcctggtgtcctcggctctggcaggctgaccaccagtcacaggcacgtcttgggaccacacttggaggtttcagcttcccatttcacctggtgctcttggggtggaggccgggatcatggaatcctttttccatggcctttaacacaaatcaatactgtgcccagtttaaatgtttatgtaactcatcatctgccggctctgctattacggtgtgcttttctttttataaaccaagctcaggggaggtgatattaagtccaggacttgcctggcgaggcccagcgcgtgtgcagaggattcaatgtggcaataagggcgagttccctgcacagcgcctgccatggctcgtcccagcctcctccctcatctgcttgtgtcctctacacggtagggaggagggagaggtccagagaggggaggtggcttgcccagggtcacagccacaatgaggtggaacagggattgtttccaaggtgtgtgtgggggtgggacccaggctcctgccagaggccagggcggcagagccctgacaggcagatcctgggttcctgggtgtccaggttacgtgggtgggcaggtggcagctggcacccaccccatacagacactctctgacaccccccaaaaatactcccaccagccccttcacattttcctccagccaagtgaccaaagcacagctcagggcccatttgccctggccacactgtccccactctccccacccaacctctgaccacaggcctgggagctgccccatctccaccaagttcaggctgcaggaggaaacgtctcaccaggcccgctggaaggtggggtggtgatgaaatgtgggggttcttcagcgagagtggaattcagtaataaggtgatcatcactgccgggcggtgcctggactcatgatgagccaggactaggtgagtgcagagggctggtgagcaggcctgatctgtgaccccggtggccctgcggctctcagacccctcacataaaatcccatcagggatattccgttccctggcccggaatgaggtcttcgtctttctgatcgcccttggagagcccaacggccttccgtcactcactcagtgctgatgtccagtcccggcaacagtctgactccgcccagacttggcgcttcccctcccatgcgcccgccgcccggcgtgctccctgctggagggtgacatggggaggggcctggctgcagcccttttcaggcagctcttgttggctgggaagggagcctggggatgggccgccttctacctgccggtggctgtgcccactctgagtgtgcttggtgggtgattacagctgctcacagctgtcaggagtccttcacagggcagtctggaagtttcctgtagagctgtctcctgcagagtccttacctagggagaccccgctgtatgtcctgtggccagtagcatcctgtggctttgctcaatcccccaggcacagtgtgtgcacccccagcctccctctgctgtgttctccacgcccctctgggcagccggcactcaggacctaaggtggtcctaagcagctctcccctgtcccctggaagtacgtggaggtaaaagctgcatccctggcagaatcagaccccaaactccagacccttttgctgtgagtctcaggctagggtctcccacctgcaggaatcattttgggccttttgagggtctctttcatagacgtgggtggggcgtctgctcagcacctgctttctccttcaccaactcctcagcctcccatctctgaccccataaacgctgagaggagaaccaggcctggggggcaagttcaaggactcaggaggcagaccgctggaatccaatctctcccctgcccttactagctgagcggctgttggcaagttgtcttctctgtgcttcagtttcttcatctgtgcaatgggggtgataacagcacacaagaacatcttggagttgttaagaagattcagtaataggtgtaaaatgctaaagctggggcctggctcccaggaagtgcccagaaggtgtactgtgataaccacagacgccacgtcaccccgctggacctggactccgtgaggagggggctccccatctccttatcccagtgtcagcccgctgctgggtaaattcgctcgccaagcccataccaggtgctaatggctgcaggagcctcttcctctccctgacatttcccttcggcagcaggcggacccctccttcctcgcccacctccatccttagcagccctgatacctctgacaatgctaattaaatgcaacaacctcatcagaaggctcgagctgggcttgcctaaggccccctctctgccctgagccctgatggatcattaatggtgtcagcagcacttatggtgatggacgaggggagcaagtcccccgacgtgctggggaggaagtccgtgacgagcatcttcatctcctgtctgcaggcctcggccagagtttccagggaacgtcctagtccacagaatcgtttgaatttcacatttaccctgggagaaccatggccaggcagggatgtcaattcccattgtatccatgaggcagtcagggctcagagagggcaagagatttgggtgagggcacacagctggtaagtagtggggctgggactggattaccacggctttgatgaaagctgcagggggcatctgtaagatccaagggcgatgtctcccccaggtggcacgtggagaagaaagccagcaagtgccaccggcttgggggtagcccagttctcgggggctggagcctgcacactctcatctcagctctgtgtcagtttcctagggaagctgtgacaaagtgctacaaactgcgtggcttaaaacaaccgaaatttgttctctcacagttctggaggccagaagtctgcaatcacgatgctggcagggctgggctccctctgacggctccagggaggactctgttccaggcctccccaccagcttctagtggtggctggcaatccttggcatttccgggcatttccaggcattgggaggcccggctcggccccccaaagtgctgggattacaggtgtgagccaccatgcccgtcctgcccttcattcttgatgcctcccttcagcctctgcctctgtctccccatggcctcctccctgtatctgtgtgtgctgtgtcttcatatggacttcttatcaggataccagtccttagatctagggcccaccataatccagtatgaccgcaccttaacttgatcatctgcaaagactctatttccaaataagttcccattcataggtaccaggggttaggattttaacatctttttgtgggatgcagttcaacccacgataccatctttgcccatctctggctctggcgtgcagggacctgttactgggcgggtcactagggataccacctctcacctctctgggcacccattggtaggcctgtgctgtgcccagcaccagggggctggctgaggcctccttgttcagtggctcctgtgtgcctctccacttgggggttgccctagagctgcccaggaagggaggaggcacctcagggggggaaggacagcatgagtttccatgggcttctcgtcacccacacagagtgacttggaataatgcacccagtggctgatctggggccctgagctcgaggctgcagccagtggcagctccaggccctgcagtgtggggacagcgatggccaaaaagagcacatgccaaaggccctgccacttaggggactttgggaaagtttgaccaagtttccttgtctctaagtaaggaatgataattggtcgatgggattgttctgagatgaaagtgctggtccttgggaaagcttcagctgaaatgtctttttattttgcccttcactcttttttttttttcttcactgttgtcgcccaggctggagtgcaatggtgcaatctcggctcattgcaacctccaccacctctcaggttcaagcaattctcctgcctcagcctcccagatagctgggattacaggcgcccgccaccatgcccggataatttttttgtatttttagtagagacagggtttcatcatgttggctaggctggtctcgatctcctgagctcaggtgatccacccggcttggactcccaaagtgctgggattacaggtgtgagccactgtgcccggcctgcccttcattcttgacgaatatttcgactgaattcagaattctgggtttccaggttttaacattttctttcggcacattaaaagagtcttctgggtgccattatttctgctgacaagtcagcagtctctgagtcctggtgtctctgaatgtaatatgttgtttttattctagctgctttaacattttctcattatttcagtttccagtagtttgcagtttgaccaggatgtacctgggtataattttccttgtgcttatcctgcttggagttagctaagcttcttaaatttgtaaattgatgtcttttaccaaattgaggaatttttcggtcattatttttttatgtgttctttttagtatatcttctctctcccctccctctacaactccaatcacatgtgtgttgaaccttttgatatgcaacaggtctttgaggatctttttctttttaaaaaaattttttttctctctattcttcagactgggtaatttctattgaaatcatcttcaagttcactaactcttctattttctcagactttctgttaagcaatttctgttaaggtgtgattttttttctgtctcagacatggtatttttaagttatagaattttcatttagttcttttttaaattgtttatatttctctgctgagatttattctttcatgaagtatgagccaattttctttacgtcttttaacacagttatcatagcaagtttaaaaatctctatttgctaattgcagcggccagcacatttcaggtgagtttccactgactgtcttttatattaagtatggctggttttcctatttctttgtatatcttcatataattttggatgatatcctgggtgttgtgaatgatagcataagagcgactctagatttttgttacttctccccaaagagcatttttgttttgctttgtatttgcaagcagttaacttggctgaaagcaactgtaaaccatctgcagtcgtgagtggtgggcagtggcaggagcctctgttcacttcttctagccctggctgggttgcagctgctggaagtctgtcctgtgtgtgtgtggtttggggtcagcccaagacatgggcagagtttatttgccccctctggggatctgtcttggtggctctcttcattccagaatttactcccacatttttccagctgctgcgagtgtctcagactctgtttgctgctctatcaagccagtgagactctggctttccgtctgagttctggcagccctatgacacaggctgggacttgtcctcaggctgtgaaagccatgagaccaggaaagccaacgccggctgttcctcccaattgctgaccgcctgcagcatctgctgcggcctcaccctccgatgccttcagagtgtcattttgttgttgttttttcaagggtttatagtctatagttatctgtgagagagttgctgcactaggagctactaggctattaccggaagcatttagagcagggcctggcagacagtaatcacttaagaaatgtgagttaatgtggtcaaccatagtgcggcgctgtttcctctggtcaaggctagagacaacgtggacacagacagcaccatgcaggaagtgtcagtacctagtgaagagcacacaatggccttaagactgcacttgtaggccgggcgcggtggctcacacctgtaatcccagcactttgggaggtcgaggtgggcagatcacttgaggtcaggagtttaccaacctgaccaatatggtgaaaccccatctctactaaaaatacaaaaattagctgggtgtggtggcaggtgcctgtaatcccaactactcgggaggctgaggcacgagaatcacttgaacctaggaggtacaggttgcagtgggccaagattgcaccgctgcactccatcctgggtgacaaagtgagactctgtctcaaaaaaataaataaataaaataaaagcctgcagttgtaggagagaccacttaactgggggagggggaaaggggactatccaggaaggcttcctggaggaggtggtattggagctggaaatgtcagataatccaagatgagaagatggactttcttcacagaggtggctgccaaaacaaccaattttatggccttactgatgagaatttctggcactcaagagaggcaacttttcctaaggcaaatcctgaagacatttacctataaaaatgagtagacattaaacatccactagctccttcatgggccagaggaagcagtgctcaggcaagaggggatctgaggtctggtggtggttctgtagatgtttgcagggagcgactggcgggactggtaggcgggaccatccacagtgaggttgggcgcccagatccatcgccacattgcagagcttgtggctgtcaattctgtggcagccaggagcacaggtgaccgggagctttagtttctgtccagtacattttggtgattcattattcctggagtcctcgtcttctcttcctccctcccagaccctctcacctccttgtctcacttgaacctctaatcctgggaaggctccaccataagcacactacagataatgaaaccaaggctcagagaagttgtgtggcttacccaagaccacacagctgaagcactggagccaagactccaaccagcacttctgtctgcaaagagctcatggcgtagtctctcatggagggagcctccatctcctctgctgccaaatggaaatcacagtagtgtctcccgcaggggctggcgtgaggttaaaggaggtagcagatatgaaaatgacatataaattgtaaattgcccacagacattagtgtgtgttgcctggtaaccacccagcatttgtggactgcatttacttgggatagcaatagttatattggcattttaatttaatagcattgttatgttcccatcataaaaataatatacactgtgtgtatgcccaccctcatcaaattatatacattaagtatgtgcagcgttttatatattgattgtacctcaatacagctattaaaaaatgatgtaacttcattatagaaaatctagaaaatatggacaagttgaaagaggaggaaatattattttgttccagctaccctaaagctacctccgttcacattttggagaattctcttccagcttttttccccactgcccagtttctttgcttatttcacatggctataatcactgatgtagatcattacaagcattttatacccaattttatatcccgttccttcaccctcagggggttttaatatgaaatagcaagaaccagcgccccatcggggaccctagcacagctgggctgggtggttctggcttctgcccagatgtgtctgggtgtccctgggccagggcaggctgccccacggagggacaatgtcaggacagctgggacctgaccctgttctgactccatgcccggtgggcgtttccgtgttcccacagagctgcttttcttatcttgtctttttaagttcagtgacatgtgcatctgtcttgatggatggatggatacgtccagcccgtcatcccacttctaaccaccctctctcaatcttttctgttgcctcaaagctggcattgactcatggctcagaaggccagggcaggccaggagctgtcctaaaaggcccagactggaaaaagaaaaggcatttcttggatagatatctctggcctggctactgcatacaggcaccatttgaagccgtgaattaagcctgaggctcctgccctcatgaagtttacgttctggccaggaagagagcctacagatgataaaagcctttacagaaagaaaaacatcagattaggttggggcagggatggtcagggtgtcctgtatgagggtgctggggtgcagacagcagtttcagcaaggtgatccaagctgtgctcacgggaaggcagcagtggggcagaattggaagaataggaaggagccatgctggtacccagggaaagccactgcaggccgagagagcaggtcttgggacagcaggtggccaggacttttgggaaagggcaaggagcctggtgtttggaggggaataagcaggtggagagcagtagatgaggctggggaaggggaggaggtaccttttgctgagttaaaaacacgagaccccgtgcatacaacagtaaatgttttcatcatcttgcatctgcgattctgtggtctgggcttggctgggcttgccctgctctgtgggtcagtggggccctgctggaggctgggcttggccgggggttgggggggttcttctgcacccactcttcctcctccccctcaggggccagtgggccagcctgcgcaggtcctgctcctggtaccgccagaggcgttgatggcaacccccagtacctaagcccctttgcatctctgtttgcggcttgtcgaattgccgttctgcaggccaaagcaaaacacagggacaagcccagaatcaaggtggggggcagagaacaggtcacctggcccaccatgggaggggtgaaggtttggctccagatgcggcccacctgggcctcggcaggtgggggctgcctttagaacactctgtgcttttctctgagtacacaatgggagccgctggagggttttgagcaggggagtgccaggatcagtcctgggtgttaccagcctctctgctgccagtctgttgaggctacgtcatagccagggagaaagagctgtggcagtcatccagtgagaggtgggagagtggctggcatcccgatatgctgtgaaggctgagcaggcaggattggatgtggggtgtgtgtgtgtgtgtgtgtgtgtgtgtgtgtgtgtgtgtgagagagagagagagagagagagagagagagagagagagagagagagagagagaacgagaaactccaaggcttgggcctgagcaagtgaacaatagagctgtcatcacctgagactggggaagctgcagaggatgaggctgaggagggatcagaattcagttatggtgaccaatgaagggttttgaatagagggacacagggatgcactggctcaggagtttggtcatcacgttggccgccagagggagaacagaggctgggacagggaaccctgtggagtgtcctctctgtggctacagggagcaacggtcagatctgtggctggtttgaaagtagatccattttgctaaaggtggtatcacagattttggagactacagaatccaggccaggagagcaaagaacgacagaggtcccattcacagcagcgggccatcccgggctcctactagcttttgctgcttgggcctatggggatggtattctagaactttccatcttccaagacatactggaaatgtggatttttataggaaatcttctacttttcaaatattaagaatgacttcaaattaaaagtaataatcattttggggctgcagtaaaacttgttggtggagcaggcctcaggcttcaggttggtgagctgtcctccagtgggggtttctcttccaggctagggccttgtcctcccctgctctcccccactcccagggctggccacccagaatgtgcaggccactcatctctgtgactcgtagaacctgagaatgttggtgatggaaggggtgttcccctagttcccacatgcaaaaagtggggcctggagatggggctgtcttttttctccaaacacttgcccatccaggaaggccagccctgggcattgaagactccaggtatgggggtgactccataaggagaggttcctgagtgacctgaagaaacatggttgggatgaagtgcagggagggtcagggcaggcagggctgagcttcgcttctgcgagcagagattagagagcgatcccagaggcctgcctggaggtggggccacagagcaggagtctgaaggagagggggtaattcacctctgtcctactgtgtgggaagccctgagtgggcccctagcagagggttgccttgcgcttatctatggagatattgggaagggcttccctgacccaggttgctggagcatgggggcctgggtggcaggggtaggtgtgggagattcaagacaggaggatgaggccacatccaggtggcttcagataccaccgtgagtcccatagagtgtccagttactataaagtctgccagccactgtggtcgccccaggcctgtgccaagtcccgagatctctgccctgcagccagtgcagagggaagaggagggcaggaggggacaggttggtggcccctcgccgatgctcctgacccctcaggctccctgctgcctcctgcccagggctgtggggcctcggggagcggggagctcgccattgctgtggcactgttgagcacccgggagaggcgggttctgacagccaccccttcccgtcttgctgttcccctcccagctgacatcatctctaccgttgagttcaaccacacgggagagctgctggccacaggtgacaagggcggccgggtcgtcatcttccagcgggaaccagaggtgcgaagccctgggtctggtgggaggtgggaggggtggggagcagagtcaggtgggaggcgggcatggtgggaggggataaggataagggggataaggggtgatgcggtgagaggtgggaggggactatactccaacccacaagagggcttttaactgacaggaggtgtggggtgtcttgcctggatcacatctcccaggggcatggattccaggggtgggaatgggatgctttggaatgccgaggtgggagtggcgggcggtggtagggggagtgcactgggtgggctggcaaagccaggttctgagccccctgccctcagccgatgtttgcggagagctgcctgcatcccatgctctgtcctagaccctggatgaatggtcaggatgtggcacaggcagctgctgccccagcttgtgccttcagtgaaaccttcctctgcctgggtgacctgcgttgtcctggccagactggggagcgggaggactccactcttgcccagctgtcacagccctcagactgagctaggtggtttttgctcaggcctgggcccttgtcctcacccctgtcctcacccccacccccgggggcttgttgtccagcagaactctgggtaagacagcagtggcctggacaacctgcccaggaccacgtttctggaacactgaaagagcctcgggacaaaagcccatttactgagaacacttgctaagtattctggagttgcttctggtttactctgcactgctcacctccgagggccagatccacacccctgtgacagatgcggaaactcagagaagccacccagctagtgaacagcagacctggctgcccgacgccaggacagtggccagcaacgtcacacaccacccggcctcagagagggcgtctccccccgcaaacacggactgtgcctggaattagatgcagaagacatccaggaaaccaaggaggagggaggaggggatggagcaggagaggcaggggaggggaggggaggaggagaagagaaggtggagaaggggaggtaggagggaggggaggaagccgggggtgaagagaggacctgcggaatcatctttcccccgattcactcctgagcatggcccacgaactgaggatccttgagtctgactttatcttggtggctcacataaccctcctcacggtgaccctgtgggtgtagtgcagtgcggctactcccctcattttacagaggaggagcccagagtgcagagggttaaaatagttgacaaggggcacatcctagctgccaatcagttcctcaaacacagcactcggccagcacctgtgggcttcaccagatgcacctgtggggtgtcccaccaggcactgcgaagctcagccttctttttgccaagctgcagaaagagatcggattggttgatgcgattttcttcattttgaatttttctcctttagtgttttcttccttctagtcccactgacctttgtcatagcgagtgctcatgggaagtgaagtgaattagaggcaaaaatattggagaacttctaagcttttcaaaagcaagacagggatagaaatatagatacttaaaaaaattaccaggaaatcttgaaattgttctgggttgaatgtctccgtttctccctggttggggtttcgtgttgtcgtatgagttgaactctctcctgggaacgtggtccctggcgcacacagtggactcaccacctgactatgctgggagctccacggtcaagggtctttattagaaggagctctgctgcctaaaccaggccaagcactgctgaggaaagccggggacagattccaatccaggtctgacattgccagacattctgtcccaatgttaaagtctgctcccaaattcatttattcctcaagtcaggcctgagttggacacgtggaatccaggagcaagtcagggcccaagacacgagggtggccagagcctcaagccttggcgtcaggcaggcctcggcagaggggtgctcgccggagagtgacctcacggctctgggaagtcacttcccctctgagtctctgtttgctggtctgtgaaatggggagagtcgtggtgctcaagcagaggaggcctggagggtagaatgcgatggtgcggggaggacttagtggggtgtccagcttgtagcaggcgctggggaacattcgcattagcaagttagccggctcgggtgtgagtgtttcatgggaccgcacgggagcggggcttgtccctggcacactgcaagtcatgggccggttaagctgcagagagtttcatttgaccctcgaattggatccctggcacggctcggcacttggtcccacggccggccctgctgggtccccggaggtcctagccgtcgccctgcaggtcacggtgctcaggccccttctccgggtttccctgcagagtaaaaatgcgccccacagccagggcgaatacgacgtgtacagcactttccagagccacgagccggagtttgactatctcaagagcctggagatagaggagaagatcaacaagatcaagtggctcccacagcagaacgccgcccactcactcctgtccaccaacggtgaggcgctgcccggcctcgcttgcatgggcacaggccgtagatgtttctaccaaatgctggtttgtatttcacttatattgtgagcatttttctatgtcttcagaacgcctagaaaataatatcctttttgagcagcatataaatcccatgagtgagtatgccagaccccctcagacgctccctgtgtctggacacagggctgcccccctttttgagcagcatgtaaatcccatgagtgagtatgccagaccctctcagaagctccccatggccagacacagggctgccccctgctgtgaatagagccatccgagccatctttgtaggcctttgctttggggtgagggagtgtgatggacaaggatgcaggtcgcagacacgggggatatttgacacaaagtgaacccctcctccccacgccgaatccagacccctagactggggctgtcaccgcggccttgcggggcagtgggaggagccttggtttaggaccccggccggcctcttaatcctcttgcctcagggaggagcatgtacccctcaggcaccggaggctctcggcctgacgcctgcttcccaggctccactctgagggagtggctggggctgtcctgcttggctcaccatgggcctgggtcccccactcacgccccctgcccatcctccttcacctgggccccctgcggacccaggcagcctggggtcgggtaggacacacctggattcttttttttctttttttgagagacaagagtcttgctctgtcacccaggctggggtagagtggcgcgatctctgctcacggcaacctccgcctcccgggttcaagcaatttttctgcctcagcctcccgagtagctggaattacaggcgtccaacaccatgcccagctaatttttgtattttttagtagagacggggtttcactacatgttggccaggttgatctcgaactcctgacctcgggtgatccgcctgcctcagcctcccaaagtgctgggattacaggcatgagccactgtgcccagccaggacacacctggattctgtccctgccctgcctcccttgggcagtgaccttgctttcctgagccccagcagggtggacacatctcccttctggggtccgtgaaatggtgcccactcaaccccctgagaacagtaaccgctgcacaagcaccagccaggcttcgaggtgctgtccccacgccttccccgaggacgtccacgctcctcagcggggcctccaaggctctcccgaacatggctaggcgcagcttctgccagcccgcctgtgcctgaaggctatcctcgccctgtacctggccaactccctcctcatcccataagccttgctgggtgcccgccttttctgacctctccactgagccaggcatccctcctgtgacaccctggctcctcttaactccggttcaccccctctctgggcacctgctgttctgatggtgttctcccgccatgcacctcaaaggcaggatctgtgtcccctaaggggccctgcccagcaaatctgtcacctgagccagcagagcatgagagatcctcccgaagggcaggccctgggggacaggagcctcgtcctgtccccatgcacctgctccttttgaaaatatttaagaaggacgtgtcagccacatgcggtggctcatgcctgtaatctcagcactttgggaggctgagatggatggattacttgagcccagaagtttgagaccagcctgggcaacgtggtgagactctatctctacaaaaaaataaaatattagccaggtgtggtggtgagagcctgtagtcccagctactcaggaggctgagattgaaggatcatctgagaccggtaaagtcaaggctgtagtgagctgagatggtgccactgcactccagcctgggtgatgtgagtgagaccctgtctcaaaagaaaaaaaaaaaaagacatgtcactttcttcctgcctctctacagaaaaggtcatctttcagcactccctacactccgctcccctcaaagcttcccacctgggtttgaatcctggcttcactctttcctaatggcagggccttgggtacctttcagatgctccactgaccccagttctcagttctcttcccagttccttctcatcaacatggtgctatttgttttgactcctgtagtagtcagggttctccagagaaaaagaatcagtagggtatgagagtgagaaagagaaagggggatttattttaaggaagtggctcacctgactgcggaggctggccgttccgaaatctgcagggaggccgaaggctggaggcctcgagacagagctgcagttctggtccaaagccgtctgttggcagaaccccctccttccccaggaggtgcctcatgatttcaccttctaaagtggatcttctcttccatccggctgcttaattatgtgactcgctttattttgttctgtttttaaagataaaactatcaaattatggaagattaccgaacgagataaaaggcccgaaggatacaacctgaaggatgaagaggggaaacttaaggacctgtccacggtgacgtcactgcaggtgagctccggtgagggggaagcaggcacacgcctctttattacacctgaggattttagggctggaaaagcctttgagatttgagccagagtcaggtgcagaccctggttgggctgctggctgctgggcggccacgggcgtcttcctgccccttgcctcagtttcctcaccagcagcatacagatgaccacgtttcttctaggcttcttgtgagcatgcaggggtggtgtatggctgtaaagtgcttttcacctatagctgagggtggagagcaaggcagataatcccttgttataagaagggggaaactgaggcccagagagagacagcaactcacctaaaactgctcagctgagtgagtaggcagaggcagaaagagaatgggtcagcagagctttgtggctcctgagtcctttactgagggcagaaggaagcctggaccgtgtgaggccttcagcatctacaaaggcctgaaacagacataccctgaaacagacacacacgtgcccagcatccagtgagccgccataaatataaagcagtagtcagtgctcttcctgagaagaagaaataaatgtttaaatacattggcctaaatgactggcaaattgcacaaataaattctgaggaagtgggcagccgattagcttcgatgttgagtaatgagggtgctggtgccccctgccccaccccccgtcccaagaaagtttatgagggtttcatctagagggaaggatacagcgatcacatcttgatcaccctggtgtttggggcagagccagtggccttcataaaaatcctgtttatgtccctcccagcgttggagatttttctctgtaagtcacacacatcccaagacacttaactgtcactgagaacctgggtgccctggtctgtcctcatcctgcctctcaccttgtttgcttccgatttcacccacgccacgccaaccctgcacagcattctacccaccctgcgcagttcacactggaggcagctgtttactgaggagctgctccacgctaggccccgggctagcccttggggccctagaggtgagcaaggttcaactcagtacctgtccccaaagtgtccccagcccccaaggaaacagacatggaatcgccatcacactggcgctcagtgcggtgacagaggaacacagagaggccgtgggcaccccaggaggcctttctctactttgtcaatttggtgaactcccatacatcccataaaaccctactggccttcacctctgtaaagcctttctgcgcaggccagatgacaattgtgatctttcctgtgtcccctcttgccttttggatccgacactgtctgtccttagtgtctgtatcttccttgcccctcatcttgactagactgtggcttctgcggaggcagcatgttttactcatgaaacccccaaaccttcagggaaggtttcctttctctcttcttctctttactaaaaaactggttttgagctctggtttggtggatggcagcaaatggctggagcactggatgaactgggtcccaaggccgcctggagaaaacagaaagcaatgttgccggaaggaagcaggaggtggactgagatgccaagactttgctgggccagtgatgctctgcccttctccagagcagctgggctccctctctctcctgagagtccagggatccccagggtgggcagtggctgcaccccgaaggaagggaaggttagcagcatagctaaaatatctgacacaggaatacgtgcagggaggatgccttggaggagtcacactaacaccaactcccaggcacacaacctagaagcaaagacacagaggcaacaatgcaagaaccacccagagccaggctgtcactcacaccggtgctgcgtgcacacacacacacacacacacacacacatgcatgcacatacacgtatactcagtcatgcatgcacactcacatgcacactcatatgcacacactcatacatgaactctcagccatgcacactcccacacacacaggctgggtgccctggtgtgtgggaaaatttaacgtgggctgcagagctgcctctgctccaaaggagctcagtgcttgtcactccgactgcagcaccgaggctgtcacctcccatctcagctgttccctgagagctcagggacacagcccattcattcattctctcacacattcactcattcactggagagtctctctgctaggccttggactgagcgctagagagatggagagataaacaagaggtgacgccttgctcccgtagctgatccctagtccactgggaaagctgatgggaccagttgacagcctcagggttggtcagggctgtgcaagggaccttcagggctgtgaaagctcagtgtctgatgccatggcaaggactcctcgcaccaactgtctgagatgaaagttcgtatgagtcaggctaactccaccgctgtaacaaaacaacaccagcagtccagggccgagcacggaaatgcatttctcactatgggaaggttcgatgtggatgtgctggttgggacacagctctcctgcaggatccttccatccccatcccatgagtctcagtccctaaggcttgggtcctcaccttccaggtggggaaggtgctcccgctgcttagctgcatcagggccaggtatcactttgctcacatcccattggtcagaactagtcatgtggccatgtctgggcacaaaggctgctgggaaatgtagtccacatgtagacagctgtttcccagtgacagcactgcattgcaggaggaggtgaggaggcctggcagacaattggctggctctgccacagtatctttttgtttcattttagagttgaggaaattggggtataggagggttcagccacttattcacagacccacagcaggtaagcatccatgcctctcttgcagggctggtgggcggcgggcatttgccatctgtcactgcctatttcagaccacggaggatcaggatggacgcccacccctgtgttccagcctccggttgggatcacatgctcacggcatgctatgtcctgatgccaccacctggccttcacctcttccctgcctcctcatcctctgcaggtgccagtgctgaagcccatggatctgatggtggaggtgagccctcggaggatctttgccaatggccacacctaccacatcaactccatctccgtcaacagtgactgcgagacctacatgtcggcggatgacctgcgcatcaacctctggcacctggccatcaccgacaggagcttcagtatccttcactgtggcctggccagtgcctcccacgggcagagtagcttccgttgggtggtgggtttggtttgattggcagacagctggtttggggatggctgcattgtttaacttcttcagtgaggcacctctggctcctagtatgcgtgtgaggcccagatacaaaatcatgtcacgtctgtttctgaaaaccgcaaagtcgtggttgctgagcattgcacccatcgcctcctccagcatggccatgatcccctcatcctagggcctcacaaggggccaggaaggagacagagttcagggttcagctgctctggacgagggactgctggccttgctcagcgtccactgaaggcgcctcggggccctccccactgggacccaaggcaggctgtgttagcataggaggaccagcactggggccccggccagggcttcgggtgacaaccagggtgtcagaagcccagctgggttggggtcctgagggccccctgctcggtgttctcctgtgtcagggcaagctaggggaagcagcagcattgacgattcccgccgactgctgggaagagagctggtgatgacatgagcaccagcctgcaggcagggcgaggcttggcctgccggggggctggtgggcgggcaggcaggttgctgtgatgtcactattctgcatacaaccaatgataataataattataataacacacagtgagactctgtgtgccaggctctgtgactaacatcaacaagcattcattttaactcatttcaccttcacaacaaccctatgaggtaggtactattctaagtctcctttacagatgaggaaactgagtcacagagcactcaagttaacttgctcaaagctcacagccagcaagtgtcaaagctgggcctgaaacccaggccctcaggccccagagtccccgcttctaacctccataccacactgccctttgtggaggatgccacccaggtgtgtcttggaaggggtgggaagaccctcctgagagcctccatgcaactggatggcctcccgactccaggcagcctgggcacccagcagtggtcaggagtgggctgtgtccctcggagcagtagaagccgggatagctgtggggagcaggggaggcagggagcattccaggaagggtgaaagagagtaacaaatggcttttgtggtctgagatccaggcacagccagagacccctgggcagggagacccttggaaaacagcgggaagggaacagagcaaagcgttggatgtcccctgagccagccagagggtgcggggcacatgtgtgggcttcggaggcagaaagtctgtttgggtctgactgccaccttcaagctttgtgaccctgggtgagtacactcacctccctctccgagactccgtcttttcaatcatgcctcctcatagacctgtggggtgccgtcagtgagcccctatgtgtgatgtgccgaaccctaagtcagcacttggtgggtatcaggaagcatcagcatctctctcccttctcttgtcccaaaggcatggagtgcccagagctgggaggctggattgggccagccaggaaggttccaggaaggattgggacctgagctgctttgaaggcttgaagctcagatttctctggacatagagggctgggctggacatctgtctgaccctccactgaagccgaaaggacatcgggccccaccagtccacagtgctcatagcagcagttggttagactctttctgctgcacgagcatgtttgatgtggataactgtaagagagctgcgggccaggtggcttcaggggctggagcatcgtgggtgatggctctctgggctgattgcctctgctgtcttctgtgtttcaatctcaggtgccagtagttggggccccaccctcccagaataaagtccaggagaaacgagaccagttctctctgaactgtcccactaggaccctaaatggcatcttgtgggctctaattgggggtgaatgccttgttgtgattggccaggccggactcctgtacctctccctggtgctggagggagtcagctccgcccccaacccctggatgtgggggaggggcggtctcctagcaggagctccaggtctgcaaatggggagggtgtggggctcactgagcggcctggaccgtaccgtacagtttacaaatcagcctgccgttcgttgtctcacttggtgctcagagacagtggtaatttgatgatcaccccatttcacagatgaggaaacggaggctgggggagatgagggactggcccagagtccccagttggcaggggcagagccagagctcatgctcgggcctccatgcctggtccagggcttttgccctggcctcggcctgccccctgcagccctgggacagtggcagccacccttctcgagcacctgcttccttcctgccggacttgggtggggatggtaattgctgctcggttttcctgtctgggctgctgtgaggattccgtgacactatggatgccgaaaccctttctaaagaaccataaagccctagagtatggaagggatgctgcttcatttcatttattcaaccattcattccccacgcctttctactcccaggcccacactgagccctagggacatggggatgaatgggagaaactcaacccttccctggagggctcaggggctgctgggggacacagccccgccatggcagtggaagtgagggagtcatccttgctgtagcccagggtctggacaagctgctgtgggggccgccaaggaagccagagaaggaatttcggtaggaagctccctgggctcgaggaggctgcctgagggcatgggtgtgcaggaggcggatgcatgaggaggcagaaggtgccggagctgtggcactgtggatggtgcaggcagggggctttctcttggggtaggggccccgaatgccagtcattcacaaaaccccccacagctgtgcctgcctccacatgccacgtgtgcttccctttacttttcccatttaaaaaaaattgttttctttaagtcaagttgctttatttttgccgaagtaattttcttttgaaagggaattgaatttcaccatgataagttaaagtatcacataccataaataggaggtagcctcaaccataacggctgtgcacacaaaatggtgggaataaaatacaggctcagccctgtctgttggaactttctgtggtagtagactgcttcgtctgcactcatggggcggcagccaccagccccatgtgcctgctgagtgcctaaaacgtggcttggtgactgaggagcgacatcgttaatttgatttagttccagttaatcatacttcaaacgaaatagccacatgtggccagtggctactgaacaaggacgctgcagcctctctccaggttgcccttagaccctgaagctggttctctctgaaaagatggaggtaaacatgtgcttcaatgttaagggggagagtgcaaaacagagacatcccccttcattcatcagaaggattgaatcctgtctccccgtctgcatctatattacattactggaggctgtgccgacttcccacctgcctgcttccagggaacgggaaactatgaagctattgatgtactgtaaacaggggcgtgtcactagccagctttggaggtgtgtatgtcgtgggtgtgtgtcgtgggtggattggattccagcagacaaggctggcggcttgggaaccagcaaggagacccggggagagagagtgagaggcagggccagagcgtggccacgggtgggaggcggtggaggaatgagattgtaaggatggaggtgtcatagatttggattgtatcataaccagttttggatcggggtggccacaagacattcagacaggttggctgtaaagaagaaaagggggttggttcatcccaggactgcaaagtcctccctggccgttaccgtgagccttgcctcctgtcccgtcccgaacacacagattgtgccctgtccgcatgttgcagagcacaccatttaccagcaggtatttattaagcacctactgtgtgccagccctcttgggtgatgctggaactagataaagattctgcctccaggagtggacacgtgataaaccattggtaaaatacccggcattggagcaggtggtccgtgggtgctacagggagtcggtggcccagccagcgcagccgtgtacatttctctccagccacgcctgctgctggctgcaggcctcaggtcggtggagggtaagccaggggtgtggtttttgccaagtgaggatgtagacacggagctgatggtgtgtgcaagagagtgaaaataatgattattgaccaaagaatctgagccaggtgagggacagtgacaagggaggagtgtcagcagatcgggggcccctgtggatcctgggaacatccctggccgcacaccctgccgtgtaactcagtgtcagatctctgtgtaacttcccattctgtgaaaatgattattaattcatcaaaacataaagcaccctggccttagtgatagaggagtgtgtgtctatagcatgaacaagattctgagctgggcttgaggcagccctgatagggcaacttaggcatttggcaggagttgagtggagtctccaggggcacatggtggccatggaaacctccccgattggatctattcattggggaacctcagtgcacctggtgctccccatggcctgttgccgcttggctccccatggggtgctgctgcagtgacaagacacagatccagggctcacaccacagagagaagccttacttggcagagaaagtgtgaggactgtgggctgcaggtgctgcgatgaggactgatagcagccgagtaatgagaggaggcgtttcatttctgacatgggaggaggccagaaaggcagctgagaccccatgcggagctgggaattgctctgaatgtttgagataccttctaagcaagtctcagtggggtggattctggctgtcagagggtgacagttctgatgagtcctgacaagaaaaacccagggtcaggaggcctgtgtccgcgcagagccaggggaaggcttgggctggacttggggtttgcatccttctgacccctgctctctggggtcctcactcggcccgatgacactgttcagtcctccgtgcccactggaggttttccaccatgtcgcatctcctaagtccaatcactaacacttcccgtctcagcaaaatggacttttagtaaccatatcaagagaaaggaaaatgtttcttagtaaaggagaaaaagagggcattgctttgactattggacaatgagaaaggtgactcagaggacatctctgctggagggagggagcctggtgatactgaggctctgtgacctgtctcggtgtagtcaccaaggttcaaggaagaggagccctcccagcctcctccctctctctcaccctcagaatggaaagaggtgcccagccctctctactctccccagacacttgcctgaatcccgccctgtcctgcccagagccttctgcacagctgtgaaattggctcatcggaacctctggtctgaccatgtcagccccccttaaaactctcacgggttcccctctggcttctggaggaagcctgagcccctccacagtgccctgtgcctttggtgaccagcccctgcccacctctcgggtcacactggctcactccttcagctgctgggtccctggcatggggcagggtggggtggagcactgccatccgccatcccttctcctgaccatgccatctgcctctttggcctggctgactcctgtttgcccacttgcagcatctcacagcccattatctgggacagcctctgacctgtccctgccacacccctcctaggctggtcagagcccctctaagcctgcggctccttggctgcccccggtcacactgagtgttttgttactgtgacagcctcctccattttatggtggaagccctgagattaggaacccagggtgaggcctctctgcatcccctgctccacataggacttggcgataggaggtacttatgaacggttgtaggtggagtgggctggaagttcaccacttccatgtggtcttaggatacagacacctcctttttgatctgggcgcctggggaatcagagaccccagaccctaaagtgcaggagaaggagcccgggctttgggccctggcgggcctgggctgagacccattgctcagcctgctgggccatcagcttccctgaatataaaatcagaaaattcccttttataaggatatttgtaaggaataaagaaatctttcacataaagagcctggtgcctaattggagcccagcaagaggatggtttattttgtctcttaaacaacagcccttcaaacatttaagattggttctcataaaatccctgcatctctgatggttaaaactccgttttccacggtgcagtttcaacgtctgtttaagcaacctctcgcgtcctttaataccaacattttgagactgttaacacagcactgggtgatttttcttgagtctgatgcatcttaaaggtaacaaattgcacaggaggtctcagcggatggacctctgctttatttttagcacccagagaatttaaaagacggttcgattgatttttctctcccttagtgatttctcacggtgggaactggcatcacaccaagcctcggcctggagaatttctaattcccatttacagagcaggtccgcacggccaggtgggctggaggggggtgcagccattcaccgcaggaggctcagaaccttcatcagcccatgcctgcctgaagactcagcttgtcttctgtgcagagaacaaaggagggagcagacacagtccctctgcatgcagactctgtgctgggccaagggaccctgagcccaggctctacccctgcctctgccactgaccctgatcagtcactcagtctttctgcaccccctttatcccatgggagtgtgtctcctttaccaggagctgtaaaggtggaatggccgatgagtatggggcctggtgccgtgtagacaagcaaccctcaccagcacatgacccactgtcgggtaccttacaggccacctcttcttcctgcccttggtgctaatttacagagaaggaaactgggatgccctgctcagaaatgctctgttcacggcatgtcagatacataccactgatggctgggagtctggacccctgggttcttactccagctctgccactacctgcccacggttctgtgcattcattggttgattcagcagcattggccgagagtcttctctgtgttgagcattggacttggtgctagggaagcagacagggtctctgccagggcctgcgagtacagttgtatgggttgtctgctgcccaaaagaggtgatgatccaagccaagcaccttgggaagaagggacttttttgtttttcagttctgcaaggaagagctgtcttttcataattggcacaaaggcactttctgagtgaatggggatcctgatgctatccaggtgaactttctaggtgagcaaaaagatagtcttcttcttgctcaagcctcgatgagtcctgtgatcccatcgtccaaatgcacccagagcccacctgcctgtctgcccccagcatgtgtttaggccactgtctcactctgatcatgatggtgacctgactggcctcccttcttaggtctaggagccagactgccagggctcagaccttggccccaagacatagggactccgcggcctcgggcagctcacttgggttctctgtgcctcagctcctcacctgtaaagcgaggaaaagcccctgctgacaccatacggctgcttgaggactgggtgctacgatgacatctgggaagcctttagggcagtgcctggcaaatcaccgagctgcagcatcattgcttcattagctgtgtttccccaggtgtctccttacagtctgttctcctacaacatgagaaaaaaaaaaacgacaagatcatgtcactccttgctcagaacccttcagcaacttctcccaactggaagtaactccgcccctttctctggcctccaaggccctgcaggagctggccctggcccctccctggcccacttcctcctctctccctttgctccctgggctcagcgttcccggccccctgctcttcaccatatttccagccatctcctgcagcagagccattttgcactggctgttccctccgcctgtgaagtttctccatcctcatccactcagtggacaccttcttaaagaggccttccttgaccagtctgtcggaactagtccatcccctccatgactccctcgagccccttccctagaggcttggcctctacctcgttccctgttcatttcccgcctctccctcctggactggcagcttcttgagagcagggaccttgtttgatctacctggaataatgcctggtccagagtagatgctcaaataatggaactagtgtaatacagtgagatgggtgttaggataaggtggggaggaccccggcctccttagaaagtccttgatggaaaggcattgacactgaggcttctgttctggacctgccacgtggtcccctggcagtttgcttcaccttcctggacaccagtttccccttctcttggctggactggtgtcctgaaactggctttcatttagacagttgggctatccttgccgggtctcccttgatctggctatgtgtgaccttgtgtcttgccagctgctagcatgacacaaggtcacacacagcttgtaacagccaggtgtgcacatctcttcccaaatccatgttcatggacatctctttggcagcttgaatttggccatggtggtagtatttctttctttttcttttctttttttttttgagatggagactcactgtgtcgcccaggctgaagtgcagtggctcaatctcggctcactgcaatctctgcctcccaggttcacgccattctcctgcctcagcctcctgagtagctggggctacaggtgcccgccaccacgcccggctaattttttgtattttttagtagagacggggtttcaccgtgttagccaggatggtctcgatctcctgacctcgtgatccacctgccttgacctcccaaagtgctgggtttacaggcgttagccaccgcacctggcctggtggtagtatttctacagatatctacaaacactacaaaatcaatctctcccctccccagaagagagggtattgttcaagttaccagcacacaactgctctggggccttcacaaggccaggcagttggtcagtcagcctccaacatgactgagggcttcctgcgtgccatggctctgtccatggtgctgaccccgttgtgagccattgcgtcgaggtcagcatctccacctcccaccccactgtcactacttgctgtgtcacacggtgttctgagcacgctgccgatgttaactggttgaatcctcccaacaacactatgtggtaggcgttattaatatcccccttttacagatgaggaaacaaagccacagtaagtttcagtaatctacccaaagtcaaaggggaaagggggtgcaggggaaagggggtgccagggctgggattcagatttaagctgtctggatgcagaaccatgcacttaactgtcatgctacaccgcctctcagtcatgatggtaacaaccccagttgcagcctgcctggtgctggggtgaacaaatgcaagatgccgctgttgcatttcagtctcatgaccactcgccaggtgggggctgtcactgtcccaactcagcagaagtggagatgggcactgagaggtgggctcccttgcccaaggcccctctgagccaagtgtccttctgatggcctgcccagctttgttgagacagccgtatttcttggttcttgctttaggtcctgtggaaagacaggcccaattgcaggatagatgggaggttgttttgctatgagcatggctgtcagtagctgtatggcagtcctcacgtttgccctgcaggtggcatggtagaggtgtgcgaccctggcctgcctcctgtcccttcttgacagacctccctggcatttctagaactcgctccctgttaaaatcctcttgaccccaggcctgagccccagacctttggcctgcttccctcttcaggatgggtcctgccactcccagccttatgtcaggacccctccaccctcatagctcatactccatcaccctggagcctctccctccctcttagaactcctctccttttggacagagcctatgctccctctgagttctgctggcgccgcatcctctccagcctggctctcaccctctctgcctccctccctcatgctcagccacccagcctctcacacctctgagccttgcactccccctcttcaaccccctcaccccctccaacacacacacaccccaaacattttcccacccactagctctgccgggataattcctactcaccatgggcttcggagggcccttccctgactctgcaccatctcagggcctcgttataaatctctgacatgagcacctgtgtctctcttaggccatcgatcgatcatggagctaaatctgcttccctgccaggctgggagccccagcagtcagggcggggtctggtctgctccttctcagtgctgtgggggtacagctgcctgggtgcacatcccagctctgtccaaccttggattccccctctcagttcttggaaaccaaggcatgccattcaccacagaccctcctagtcctcccagggggtgacaagcactgtaccttttgcatcctgcttagctgtatgcttttttcccagagggagagaaagactctgggagttctaatttaactaaattcaatttaactgtagccatgtgctgggtcttttgacatatgtcatctggtgaaatcctcattacagccctgcaaagcagaagttatcaacccattctacagataagaaaagcagagcacagaaaggctgagttttcaagagatcacacagatgttaggcagtggggctggactttcaagctctgggttttgtgattcagaagtcaggactttcttcctttttcatagcttggttgattcctttctaagcacttatgaatcacctgaggtgggctatggcagagctgtgaagatggactcaccacacagagagcgtgcagggctcagtggcttgtgcagtgagcggtgaaatagaacagcacctttcctacggttccagcaagctgggttctgctccctgagaggaattgcataatcattaaggtgttccgagtggagaaggaaaggaggctgttacaggctagattgtgtctcctccatccccattcatatgttgaaaccctaactcccagaacctcagaatgagactatatttggagacagggccttaaaggggtaattaagttaaaataaggctggcagggtagaccctaatccaatctgactggtgttcttataagaagaggtgattagaacccacagagagatgttaagatgcaggaataagaatgtgaggacacaaggagaaggcagtcaccttcaagccgaggagacgggcctcagaaggagccagccctgctaacaccgtgttattggacttcggacctccatagctatgagaaacacatactgtttaagccactcggtctgtagcattttgctatggcagccaggaatcctcctgtaggatctgacatgccttggtctgagtgcttgcagctcatgtttgtagtcaggtcatcttttggagatttgctgaaaaagcagtttttcaagatgaactccatgtgtgggaggccttctagggcacctccgcatccggcgtccctggtgagctcatgcgtgagtccttttgtggctcttggcagggctgcctccatccctaactccggtggctgcttggttgccatggcgacagcttcctccatcctgagagcaggctcctgccgagacatctggatgagcctcactgtgctcggtgaaatcggtggagcccaaggctgcagccctctttctcatggatccctgctctgcacccagcatcccccttgctgaggacacaagccagtccagccagcctggcatcagggtccttggggtgcccaccccatggggaaagctgcagatggtgtggaaatgcgtttactccagaacagtgggaggaacgctgactggaagttagggagccaggatttcagtccttactctgccagggctctgcatgtggccctgggcaaatcactgcccaccctgggcctccctctcctcctgggtggggttggcacatgggcagttcctgcctgcaggggtggactatttgactggtctgtgctaggcatggctctctggggttattaccatgtctcaaagttcaattacttgctgtggtttttagattagcttgtcgtgggatctccactggggcccatcatgaggtgaaccagtatttgcacactgcttttggcgtttgtggagtgctttgcatacttgcttctctcttgagctccttgccagaaccaaccagtgatgcttcttcatttcacatacctggctatatttccagtcagcagagatttgccctgtagaggagcgagcagcccttggttcctgtgcccaccttacaggagaggacgaccggggggcagactggtgcagcttagctgccatggctcctggaggtgcagccacctcctccagcctcacgtggggctggtgtggctgagctcgcgtggctgggctccaggagagcaggctgtgcctctggtagcaggagatgaaggagtttcttttttttttttttacaggtgaaataaattttaatgataaaattattttagtaataaaaatcttaataataaaatgtatttaactaaatatacccgaaatattatcatttcaacattggcactagctacatttcaagtgctttttttgttatttaagttctagggtacatgtgcacaatgtgcatgtttgttacataggtatacatgtgccatgttggtgtgctgcacccatcaactcgtcatttacattaggtatttctcctaatgctatccctcctccattcccccactccatgacaggtcctggtgtgtgatgttccccgccctgtgtccgagtgttctcattgttcacttcccacctatgagtgagaacatgtggagtttgattttctgtccttggaatagtttgctcagaattatggtttccagcttcatccatgtccctacaaaggacatgaactcatccttttttatggctgcatagtattcaatggtgtatatgtgccacattttcttaatccagtctatcattgatggacatttgggttggttccaagtctttgctattgtgaatagcgccgcaataaacatacatgtgcatgtgtctttatagtagcatgatttataatcctttgggtatatacccagtaatgggattgctgggtcaaatggtatttctagttctagatccttgaggaatcaccacactgttttccacaatggttgaactagtttatagtcccaccaacagtgtaaaagcgttcctatttctccacatcctctccagcacctgttgtttcctgactttttaatgatcgccattgtagctggtttgagatggtatctcattgtggttttgatttgcatttctctgatgaccagtgatgatagcatcttttcatgtgtctgttggctgcataaatgtcttcttttgaaaagtatctcttcatatcctttgcccactttttgatggtgttgtttgattttttttttgtaaatttgtttaagttctttgtagattctggatattagccctttctcagatgagtagattgcaaaaattttctcccattccgtaggttgcctgtttgctctgatggccattttttttttttttttgctgtgcagaagctctttagtttaattagatcccatttgtctattttggcttttgttgccattgcttttggtgttttagtcatgaagtccttgcccatgcctatgtcctgaatggtattgtctggatttttttctatggtttttctggttttaggtctaacatttaagtctttactccatcttgaattaatttttgtataaggtgtaagggagggatccagtttcagctttctacatatggctagctggttttcccagcaccatttattaaatagggaatcctttccccatttcttgtttttgtcaggtttgtcaaagatcagatggttgtagatatgtggtgttatttctgaggcctctgttctgttccattggtctatatctctgttttggtaccagtaccatgctgttttggttactgtagctttgtagcatagtttgaagtcaggtagcgtgatgcctccagctttgttcttttgcttaggattgtcttgggaatgcgggctcttttttggttccatatgaattttaaagtagttttttccagttctgtgaagaaagtcattagtagcttgatggggagatgaaggagtttctataaaaacctctgcatgcccgaggactatacgggaggcctgtgtggatcacacctcctgtgtcctcggaagggatggctgcagacttcactcttgggtggaagaaaccccgctttgctgactcccccaggtgcaggttctgagctcacaggggtggtctgaacagctgggggcacccagcacccctacccccacccaccagggtgaggagctccttgtactgtggatgggggaccgggataggcccacctgtccctccagggctgcacttgctccatctgacattgaacctgggcctgtgtgcagtaaagaagggaggctgtgtgacccaagcaagactgcatcgcctcctgtaggcctggggctgtgggcggcagggcaaatccactgtgcgtggggctttctgtgcacatagccatcctttgtttagctagcacctctggctggttttctgttacaacagcagagttgagtccttgcagtttcgatagaaatcctacgtctggctaggcctgaaatattgactctctgactctttgcagaaaacacttgccaacacctgtgaatgttggcactggaaggaaaagggggtccatttcaagacatggggggctgaagccagacaactgccaggtccccgggcccctccagggacctgacagcccctccttgcccagcacctcgctgtccctgtctcatgcccatgactgcagctgtgactttctcctcctgctccctgagcctcagatgacacagagtccagagaggctgagactgacccgaggtgccacagcagatgaaagggggatttgaggctgggacccagggtcccacctgacagcctttccctgcccagcacctcgctgtccctgtctcatgcccatgactgcagctgtgactttctcctcctgctccctgagcctcagaagacacagagtccagagaggctgagactggcccgaggtgccacagcagatgaaagggggatttgaggctgggacccagggtcccacctgacagcccctccctgcccagcacctcactgtccctgtctcatgccggtggctgcagctgtgactttctcctcctgctccctgagcctcagatgacgcagagtccagagaggctgagaggctagcccgaggctccacagcagatgaaaggtggatttgaggctggaacccagggtccctggcagccaggcagaacaggccgcagaccttctcagcagctcacctacagagcgcccactctgagcctggtcctgttctcagcgcttcacgtggactaccttaccccatcctcatctgggagctgcagagtgcaattgcccttctgaagttggggaaaccgaggcacagagaggttcagaaacttgcccaaagacacatagctagcaagcggcagagctggagccacccccagatggtcagggggcaaggattgcactctggagccacggagggcgtatggaagactctggagcccaactgagtcccaggcctggtctgacccttctctccttgtccctgagcaattggcttctcctcgccgagcctctgtttccaatgtagaaggggcacacctcactcatggaaggcagaggggattggatgagctacagatgcgaagctagtcccacccagccagccggccgcacgtgttagctgcgacaggtactaggtgcttggctggggtttgggggatataaacagtagaacaactttgcctagtcaggtgaatgacacaagcaggtcagccagtatttgcaacctaaaaagatctcgctcatgggccttggagcaggtgcagtggagaccagaggaagcagtgtaggaacaagttcttcctgatggacttcactggacccgcagcacgtgtgacgtgcttcccagaccacagtgctctttttttttttttttttttttttccaggcagagtctcactctgtcacccaggccggaatacgtggcacgatctcagctcactgcaacctctgcctcccaggttcaagtgattctcctgcctcagcctcctgagtagctgggattacaggtgcccactaccacgcccagctaattttttttgtatttttagtagagtcagggtttcatcatgttggctaggctggtctcaaactcctgacctcaagtgatcctcctgcctcagcctcccaaagtgctgggattacaggcgtgaaccaccatgcccggccagcacagcactcttgcgtttgtaccgcagcagcaatactttcaacacgctgcagggggacggctcctttgaatggcctttgtcagtgacgatccactcctaaaaaacccctcacaccctggggcctccttgaccatgcctcttttttttttttttttgtgctttctgtggctttcttttttcttttttttattatactttaagttttagggtacatgtgcacattgtacaggttagttacatatgtatacatgtgccatgctggtgtgctgcacccactaactcgtcatctagcattaggtctatctcccaatgctatccctccccgggagttgaacaatgagatcacatggacacaggaaggggaatatcacactctggggactgttgtgaccatgcctcttatctcaactttaacagctgcttccccttgagatggtttgcaacctcctgccccctgagccctgatcagaggggaccacaatgggctgattcattcattcagtcagcaactacttactaaacacctactgtgtgccaggcactgaaggtgcagcagcaatcctgacaggcaggtccctgccctcgctggggacagatagcaacaaacaggccaataatgtaataagcagtgattaatgcttgcaaaaagagaaagcagaaaatctataattaaacaaggtaaaataaatgtttattttgaggggcagaggagatttacaggaggttactttgttaaggagcattgaggcagggatctgaagggcatgagtgtgagggccctgcagtgggaatgtgcccaacacgacctgggttgattggacacctcctccgtgcgcacaacctgcagcttcttctaaggggcaatggggcctggctgtggggggctgtgggcggaggaacccaagctggattcgcaatcacgcacccgggctcaggtatcagctctgctgctcactgactgtggaaccctctgagcctgtctctggacctaaggaaagcaaagtggagcaccagctgccttctgcaccctgttagtgtgtgttggggtgggggtggggggcaaatgaccgtgaacagagtttctaaattggaagggctgttcccagggaaaggttcagagtcgtctccccatctaatatttgcccacggatcagtcatgcagcgaacatgtcccaggcaccagctctgggcaggtcgtgtgtgaggggtgtgggggcacggaggtgaatcaggaggtggagctggccctggagccgactgcagggcgggacagatggtcacatacacagcacaatggtcctgaggatgagcagacgggtaaggccttgccttggtgttcaggcagagactaggaatgctccggcaacttcgaactgctggatatggctggcgggtatggagggagaagcggccaaggtgagactgaggaagagcaggcaggggcagcacgctgggcaagtccgacctcctcggtggggtgggagaggccaacacgcagggtggtggggagtcccgcagctgtttgaggaagttcactctagctgagcttgggcacggacccccatggggacagagatgctgatggcctgggctgaggggcagagcgcaaggggttcagatggaggaaccccaggacctgaaggctggctggacaagggaagggcttagaatgaggaagaagccccctgatgcctggcttggtgccccagggctggggatgaggaaatgggagttctagagaaggagcggtgtgggggctgttggtgtggggggctgtcggtgtgggggggctgtcggtgttgggggctgtcggtgttgggggctgtcggtgtgggggggctgtcggtgtggggcggctgtcggtgttgggggctgtcggtgttgggggctgtcggtgtgggggcgctgttggtgtgtggggctgtcggtgttgggggctgtcggtgttgggggctgtcggtgtggggggctgttggtgtgtggggctgtcggtgtggggggctgtcggtgttgggggttgtcagtgtgggggggctgtcgggtgttaggggctgttgcgtgttgggggctgttggtgtggggggtctgtcggtgtgaagggctgtcagtgtggggctgtcggtttgggggggctgtcggtgtggggggctgtcactgtgggggggctgttggtgtgtggggctgtcggtgtggggggctgtcggtgtggggggttgttggtgtgggggggctgttgggtgttgggggctgtcgggtgttgggggctgttggtgtgggggggctgtcggtgtggagggctgtcggtgtgggggggctgtcagtgtgggggctgttggttggggggctgtcagtgttggggggctgtcggtgttggggtgctgtcagtatgggaaggctgttgggtgttgggggctgtcggtgtggggggactgtcggtgttggggggctgtcggtggctgcccatagcactggcattgcgtctgctcttatttcccaactcccaggaagcaccttgggtgggttagtgtcctgtggctgctgtggcaaattgccataaccttcatggcttcaaaatacagatatattctcaccgtcctgggggccacaagttctcaatccaggtgttggcagggccgtgctctctctgaaggttctaggggaggaggcttccttgtctcctccagctccggggctccagatgttcctgtagccatcgctcccatctctgcctttgtctccacatggccttctcctctggtgtctcctcttctgtctcttagaatgtcacttgtcattgcatttagggcccacctgggtaatccagggtgatctcatctcaagatctttaactacatctgcaaagacccttttcccaaatgagatcacactccacagtctctggggatcaggatgttatggacacatgctatgctgatgtatttgtgggggccattattcaacccactgcagtggagaaaaatagtctgtgctcagttgaggcatatgggattgaagagcgattttaccttctctccttttcatcctctctgcataacttgctcctctctctggaattcctacctgtgtctgacaaacttttcttgcagggaaaatgactcttagatgctagagtgtgattggaagggaaacaaatcccaccagacagttggagtggaattagatgggaaaacagaagatgaataattcaagcagctttgccaggggaaaggggactcttaaatgagcctaattatgcttgttcccaagggaggccagtcctgaaatgaaccttgtgaagcagtttttcaagcaggatttaggcgggtatcatgaagctggggtggggccacctgcggttagtcctggaaaggaaagggcccaggccctcattttgcagatggggaaagcaaggcttgcagaatggaaatgatgttccagtaacagccaagaccagacgcccagccgggggccccgagtgacagccaagaccagacgcccagccgggggccctcagcttctgacctggtgctggtcctgcctaagttaaagccaccgagtgtggtcactgggccaaatgcttcaaagtctacacacgggggagggcatggtgtggggcagaaagctgtgttcacggtagctgagtttgggcataattctcgtgctccggaggcttctcccacagctacttcccttgtcaggagtccatcttcagggccctgtgttatgatggattgagggagcaccaacaggggccaccccacttggtaattaattccttttgtaaagggctgggctgcaggcccgggtaggtcctatggccacctgagccaaggtcttggagaggcggtcgcacggaccaggtgaccatggacccagcccggtgcccacaccgtgaagggtgctgtgctgcccagaggttctgggcacggctctgggccctgggattcagaggctcgggactgcttgcctccccacggagatcttaccgtggggaccctgttgtggagggcctgccgcattggccgtgacagtgatttttctccttctgcagggtgatgtggatgcagggcctctgtgtctcacatggttgtttcacagcagccaccgtatccgaagacagagagaaagagcaggagagattcccctgtgatggctcccccatgggtcctgacccaggtttgggagactttatctccccaaagccaggccctcgatccctttgcctttggggactctgtgtccccagcctatacatggggtgctcgattgagtgtccgtgcccctcagccggccctgggttgccgtggctcgggtgtgtttgccacagggctacagacctaatggagccctgcatacttttattaattaattaattaatttatttatttatttttgagatggagtcttgctctgtcacccagtctggagtgcagtggcgcgatctcagctcactgcaacctctgcctccccagtcaagcgattctcctgcctcagcctcccaagtagctgggatttcaggcatgtgccaccacgcctggctaatttttttttattttttatttttagtagagacggggttttggtatgttggtcaggctggtctcgaactcctgagctcaggtgacctgctcgccttgacctcccaaagtgctgggattacaggtgtgagctctggtgcctggcctcctacatactttgaaaagttctgaaacatccccaggtgggaaaggaaagagcgtttgggtggacactgaacctgtcagggggctcacgttttgcagtggtagcaaacaacctgaaggtctccaaggcctcaaacacccacttcacacctcccactcacgctgcaagtgtggccgtcacaggctggctttggtgcgatctcattgcggagggaacagtgtcacagcagaccacgtgctggctctcaaaacttcagcctggaggtgacatgcctcacttgtctattcattggcagaagcaaccagcctctggccactctgggttctgaaaggccgaaggagaggtctccccttgggagagaacctggaatgttcagagaaccccctgggtgtcagcatttgacttcatcccaccgagtcctcctgcacccactgcgccccatgagttataaccccaggaaatacaacgagaatgagtgtcctgatgacgcaaacagaactcctgtgggactcacgttcctgggcgcttctgttgccaccaagcctcctgtggcttttgtgtgtctcagggtgtgcagagagaatgtagcccctctctgccctgcctctctactgcacattatccatgggccgtcgcactaatgtgcgtgacatttcatcagtggccgcactttttctctggatcccactttagtgaagttcagtaaggacctgagagctgctccgagcgggcagcgtgtcctggaaagccatgggaggcattcggcctgggagggctgggctgccaggtggacgctggagaaatcagcatggcaggaggagggctcttttcttgcttggccttcagtatcatttttcattatttaatcgctgcttcttttcatactggaaaactgtagtttcctgggaaaccagccaggcagtgatgccttaactcatttttccctctctttctatttttatgtgattctcagtttgtggttaatgacgtgcttccgggaagcaagatttgagcacgagcacagagacccttttaggtgctttctgactgcacagatcagccatttttttccctggcattttataaaccctcgggtttagagaggtcagaaaatactgcttgcttgctttttttttgacagagtcttgccctgtcaccaggctggaatataatggtgcgatctcggctaactgcaacatccacctcccaggttcacgtgattcccctgcctcagcctcctgattagctgggactacaggcatacgccactactaatttttttttagtagagatggggttttgcaatgttggtcaggcttgtctccaactaatttctttttgtattttagtagagacggggttttactgtgttggccagaatggtctcgatctcctgacctcgtgatccgcccgcctcggcctcccaaagtgctgggattacaaatactgctttcttactgagagaggcagcagcttgggtggaggaagagggagggcagatggatttcagagtttcagtcagtattttccagatagaaaataataaaaatggaaactgacattcattgagctctgcaacgcatcaggcagtgtgtgaagggctttgcctctgatgatcttcacagcgaagtgataaggctatactgctgactcattttacagatgaggaagctgaggcatggatagctgggaactcactcagggtcacacagccaggaggtgacagagctgggattcaaaccccagaccttccaactccagggctcacatgcacctgaagagtcagagggaacagaccgtgcaaagccccatgcagggccggggagaccggagcctgaggtcattgctgtgagaggggagagggcctttctgtcagggtgatgggtgggatctgaagctggaaagccggagagaagctcgggggtgccagtccttgcatgctccaagagattctgatctgctgctgggcagcagggaagggataggaaaagagcaggtgctggggccggggaggttgtgaggctgaatccagccttaccaatcacacctgggccaccccggacgagttgctcatcttctctgtgctctagtgtaacagtcagggatactgcctttgcaagcagcaaagttcttgactctaaacaaaaaatggacatttattggctcccacatttagcagtctggggggaatggcttcaggtgcagcttgatccaggattccaatggcatcaccagatctttctctgcactctttccactgtctgccccaccctcaagctccagggtttctccttgtcctggcagcagatagaagctccttctttctacaccacccagcacagcaggggtgaccaagctgcatcccagccttttcagtattccaagtcctggggtctggagagcacagatcagagccgaggtggggccgacccagaaacccagaagaacctttgcccaaaggagaatctccatactgtggtcagaagaaggggagcaggtgccgggggcaggaaggggagctcccagatgcccacacactcaattccagacacaatttgaaaagggaccgggaagacttgaaatcattcaccaatagcatccactgcccagcatgcagtcggcacaatataaatgctctttttcttctgcttggcaaccaacaggggaaggaaggcagaggagaggggctccacaggtcagtgctatgtgtggctggaactgatgcaccctcactggggtggggtgcaggtgaggggggccgcaggtcaggagggaagtggtgggtccagcttcatgggaacaggggacaggcacctagaaggggtagccagcaggcagttcaccatgcaggtctgcagctcagggggacgcattttgagggtctcaggaacagagaggcagctcagacgcgagggtggacggttttgcctcgggagaggtgtcagaaacctccgggaaggcggagcattgagggcgcccttcactgccccttccttgaccgcactgcccccagacatcgtggacatcaagccggccaacatggaggaccttacggaggtgatcacagcatctgagttccatccgcaccactgcaacctcttcgtctacagcagcagcaagggctccctgcggctctgcgacatgcgggcagctgccctgtgtgacaagcattccaagcgtaagtgccggtgcctgggggtggggggctgtgcattgggcaggcgggcgggtgggatgtcctgtcctggtgcagctgctgcaggggtggtgggtgtgggatgagcatgtcctggactggccaaggtgggtgggcccattgctgcttcagcgctggctggtcggggagcctggtcttgccacctgctgccccccagagtccctgcacagccaggaacagcccagcttttagggttcagggctctagggcgagggtcagggcatccagaaggtaaggaggcaccaaacttaaatgtcacctcctgtaggaaagcttcccggcctcctactttagatctggatcctcctctgtggccctgcagcccccaaagcttccctcttccaaaactagccacacccagcaaacttgctgtgggctgcccatcttctccggctccttggagcagggtctgtaacatgtcccctcatcctagaacccaccacaggcctgctgtgggggtcccacaggggtatccgtggaggtctggggctgaacgagttccaggggacattttgtgacacagcagcccccagcataacagctcacactgaacactcactctgagcccagcccttaccaagggctttacctgtgaactcatcgaatcttcacacaagccccaggagatgctgttcagaagaggaaacagaagctccagttattggcccaaggtcacccaaattcaatcgtggcagagctgggctgcctggcactgggttgtggccatgggctgcacactgccacagccatcccagaggcccctgaaggcgagggatcaggccacggcatcctccttcccagacagccctgcagggctagcaaggggccaggcaggaggtggggtgtcccccaggcagagggcagggactttgcttatctggttcccctcactgtctgtccccagcacctaccacagtgtctggaaataaacacttgttgaataaaccccagaggaccctgactgaagcctgggtgccggcggcagagggctgtttgggagcgatggggccacactgttcccttagggtgtctggttttgctgggcagtcagagacagggtgcacaccagccccaggactcaggctcagggcccaccaaaacctccagcttctgcctccttccttggccaagttctggcccccacatccaccccctcatctcctctgggtttgtccacgctccgtgtgtcacgctcagccatccaggcattcagtaggcgcctattcctggcatgggtgtgcagcagaggcccaccgtcgggagctggcgtctgcgggggagacagacagtgaacacacacctgacgcatgtcagggcatggtgagcaatggcaccaacacccacaaagtcaggtacagggacagagggggtcagggagggcctccctgaagagaccacagtggaacggacaccctgagggggtgggtggtgccgatctctggggaagaatgttcgagaaggagggcactgcagtggccgtgactccacacattgcctgtaggtcaagggagggactgggttttgttctggctgagctgagaatgagaagctgtgggttgtcacgagattgggacttgaggaggaagaggagacgccgcagagggtccccgggggagcaggcgtcagaggtcgctgcagggtctgcaggaagaaatggtgaccccactgagggggttgttgggaggtggggcagggctcacctggctgccccctctggatgttgcttggaggtcgagctttgccttgtggggcgtgactctgtggttggtttgagctgtgggtgaaggtggggccgtggcctggaacaacagggggtgccagggaccagcaggcaggtttcagacccgcgagcctgaggcccgtattgggttccaaggaaatgggtcgagtaggcagccagatatccaggcagtaatgccacctggagataagtgtggagttagtggccgtggactgatgggaggctggagaccagctgagattcccggggtgcagggggctcggggctgcgtcctgtgcgccacaacaaaggaccacacacttggtggctgaaaacagggcatatgtatagtctcagtccgcagtcccacagccagctcactggccataatgaaggtgccacgggctggtaccttcgggaggctctggggagcaccgttttccctgcctcttctggcttctagaggcgctgcgttccctggcacgtggcccctcccccatcctcccagcccacagcggccaagcctctctcacgtctctgaccctcctgtctgtctttcgcgtataaaggcccttgtgatcgccttgttcctgccacccctaatgatccaggatgacttcctcatctcaaggttggctgagttgcgtccttgatttcatctttggccttattttgactttgccgtgtagcataacatagtcacaggtgctagggatcaggacgcagccgtctctgggggccgttccaccgcctactacaggacactgcccccccacctacgcctcccgcccattcactcaggccacatgtgcctccagctgtgcctgtgtacagccaggtctgggtccgaatggaatgggagaatattggggaagagagggggttcttcctgctcctggtccgctgctgaccccgtgtgagccctgtgggaaggaggatggggcttcattggcaccctgttgtttataggggtggaaatccagaaacatcctcaatatcccaatcttaaatgctaagattattcaactcttctgaaatgagtgaggcagctttttgtttctttttctggaaccgttggtgtaatatatctgctccttgaagtattaggaaaacttgtgtgcaaatctattcggcgtccttttgagggagagaaggaaaattttaagcaaccagtttaaaatgccgagaaaatgatgtcgacagtgatgacatccatgtactagaatattgttcggtcatgtcagctattgttttagaagaatttttaatgccacagggaagtgattatgttgaaagatttaggggataacaaaataaggctatgaccaccagaaaagtggaaacagagaaaactctggaaagaaatacactaagttgtccctgagtggtgagctataagaaactgatggaatattttctttttatttttctgtgtatttttactttcatgatggatttgaactttgaatcagaaaacacatgtgtgtgcaggaagggtggaatttagagagcacagagacgggcataggacagttttgtgcacccctcaatgtttgtgtgacatttttcagtgggctagagggggcagtcagaccccctttggctcccgaagcctgtgctatccggtttcccagggcagaagcagcggtcacatataccttgcacatttcgtgagtccaagcacagacacatccatttcagccacgtaatttcatatgcctgatgatgtatgagccttgtgtgaatcagccaatgaactcaacagtgcgagaaatatgagtgttttcgatgactcaattcaatttcattcttcacccccagctcccagggctgcagtgaacgttaacttttagggcctcggcagattccactcctctccggattgcactgaggttccagaaggctctggcaggccgaggtgcggagagagggacatggtgtcttccaggccactgaggacttttgattgtgcctgggcgaccttggggccaggtccttgctgacaaatccccaagggcctgttggctgtgctcagtgactcacctgggaggttggcaacatgctgacctctggcggctcttgcccgcaccagtgatcccaagtctgtagacagggtggggctgcctgtgatgtactaaggttttatgtatgctttttgcacacacagtcataggtgaagttggtttataattttcttttcttatactctctttgcccaattttaagattattcaactctcctaaaatgaactgggcagctttttctttctttttctggagcagttgatgtaatatatctgctccttgaaatcttaggaaaacttgtgtgcaaatctatttggtgtccttttgagggagagaagaatttttttctttttttttagacagaatttggctccatcaccctgacacgatcttggctcactgcagcctccacctcctgggttcaagggattctctcacctcagcctctggagtagctgggattacaggtgtgtgccaccatgcctggctaattttttttgtatttttagtagagacagggttttgctgtgttggccaggctggtctcgaactcctggcctccagtgctgggattataggcatgagccaccataccaggccaagagaagaaaaattttaaacaaccagcttaatttcttttttgattattgatttatgcaaattttatttaaaatttttctagaatatttttcattatcaaactcaatatcctgtacggaaactttctctttcgtgccagcaaaaagattgcgcagcagtttttagcatgcttttacagcttccatttctcctcatttaatttgccgcacattggggcgagtggctgaagtgtctgtccttctgcatgccttgtccgggctgtgtttttgctctgtggctctcatgggaaatcaagcacgcagccgctttccaattagcaggtggcggctgtttttaatctgaacacaaatggctgttatttgagctaattttttaaaagggatttggggattaggattagttcttcacctcccacttccatccatgtatccaattactgctcaaaactcagggagtggctgatagtgacaccccagagatgtgctcacagcatcattttcctaacagaatcagaccgcgaatgaagagcgtcctggatgcaggaaggtgagcatttctgccattggacagatgaggagaccgagggtccgagaagctctgtgacttccctggacccctcctctatcagggcagagctgggggcacacaggccactctgttccctctgcagcttcccacctttctccgaagcactggaaatccgcgtcttgtgactgcttggcagtgtgacagggtaaccgtggaaacaaccgtacatgagtcctcaaaatagacagttacttctgcttatgacagcacagagcctgcggaaagaaagggccgtgcccggaacactgggatttcttagaattgggggtgatgatggctgagaccctgatttcttagaatcggggccgatgatggccaagacccttcataggcccccaacgacgtgcctggcccggtgttgggtgaaataataaccgcagctcattctttgcacacctagtgcaaacacatgctgttttcagtttatatctcattaaatactcagcacctatgatgggtgtgttatagtattcatcctacagatgaggaagttgaatacacttgaccctggaatgatgtgggagttaggggttcagacagtgcctgaatgcagttgaaagtacatgcttaacttttgactccctcaaaacttcactcctaatagtcggctgttggtggggagcattaccagtaacatcaacagctgatgaacatttgaagagactgatgtctacgtggattttatgcatttgtgacatacctaactttttcttttcttatatatatatgtatgtatatatatgtatgtgtgtgtgtgtgtgtgtgtgtgtgtgtgtgtgtgtgtgtgtgtgtatcgtggcagatctccaaaatgttttcagtatatttactgggaaaatcgcacatcaggggacctgcaggttcaagcctgtgttgtgtgagggtcaaggggcaactgtatacgcacttctcattgctgcgggaacaattgccatgagcttagtggctcaaaacaacacaaaagactgttgtacattctggaactcgggctaaaatgaaggcgtcagctggcctgtgttatctctggaggctgcagggtggggctgttttctgatcttttccagctactagaggcttctagaggctgcctgcactcctcagctcatcattccaacctctgcttccatcatcccatctctttcttccatctttgaccttccttcttcctcctatacagacccttgtgatgacattgggcccatccagattatccagggtcacctccgtacctcaaggtccttcacttaatgacatctgcaaagccccttttgccatgtgagataacaggtgcacagattctagggtggaggatgtagatagacgcctttaggggtcattgttctctgctacattgaagcacagagagattaagacatttgcccaaggtcacacagctaagtagagccaagatagagcctcagagagtctcatgccttcaacctgcactctttttccctttctcatcacagaagccttgagaactaaaactcttacaggaattgtgggtgagctgggttttttttttttttttttttgaaatggagtctcattctattgcccaggctggagtgcaatggcatgatcttggctcactgcaacctccacctcctgggttcaagcaattctcctgcctcagcctcctcagtagatgggattgcaggtgccggccaccacacccgactttttgtatttttagtagagacaaggttttgccatgttggccaggctggtctcaaactcctgacgtcaggtgatctgtccacttcggcctcccaaagtgctgggattacaggcgtgagccaccgccccccacctgagtgggttcatttaaaagggctgtgtgggctcaactcccagggctcactctagtaatggatctgctgcagaaagaccagcctcagcccagaccctgcagctctccaggtgcaggaccagggcaaagctccccaacagtgggaacagcccatgtgagggccctgtggctggatacagaggctggagagaggaggtgaggtcagagaggtgtgtggctggaggaggcctcacaggccagagcaagagcttcgggtttcctctgaaagggacaggaaccacaaggccgtctgagtagggagtgggccagcctggccatgtgttcacaggatccctctggctgcccagtggggaataagctgaggggtgaggtagaagtgggggctggctgggggctagcgtgttcacgcaggtgagagacgctggtgcgcagagtgagtggccggtgcaggtggggaaggtggtgggccctgccccccatggcaggtggggcctgctggatttgctgctggattggatggagagggagggagggtcggggatggcttcaggctctgtacagagaccaggctcccgtctgtgtggagctttgtggagggaccacaggaaggggactagtaaataagtaggtgcattggagtgggaaggtttccatgaagggcatcaggagccctctgatgcattgcacctcaggggtcaggagaggtgtccctggatgagaaagagcctgggaatgggggcgggggtgccccaccccacagtagtgtctgagaggaacctggctgacgtcaggacccgtgtggctggaacaggtggaggggtgggctcttgtgtgcaaagatgggttaaggggagagcgtgccgggcctgggggccacagctgggcttgagttttttgtttgatggggctcgatcacatggtgctgggcagggagtgacaactgtcatctcttcatcagtgagcattcattgtgcccacctgtgccattgtaggaactccctgctccctccccactgtgtacagcctcagggatagggaaagaggccgaacaggaggcccctccccaaacagtggcatcacctggaacccaggagcaagccagtgtccaggggtgctcggggatccataacccccatcgtccttcttctgcttctcggaccctccaagctcctcctggagcgcggcctgaggtgaggccagctggcccaggccactccaccctcgtggatggccttgtatcccatcagatcacaggagggacccgtggccagggtagccaggggcgatcactgcccaggaccccataggcccctccccctccaggccacctcctcccatgtttcccacctccacccacctgcaggtccctcccaccctcatctgtttctctggaggcctcactgaactgcacttgtccctgaatgcatggctcaagcccatgcatttctactgtgtgaacccaatcggcctccaccccagccccagaggagtgtcgtccacacactgacaacgatgggggtggggcacagcaggtgctaccaagagggccacagagcaagtgccacgggcacacaggggccacccccaggctggctgaggcttctctgccaggcctggaaactgcagtggaaccacatcaggttggggaagaaagatgtcagtgaggggctggagcagaaacggcaggcagctgcacaagcttctctctgctcagggagcagggcggggccatgaggcagggtctgtgctaggcaggggcgccaagatgatcagtgactaatgaccaaggcaggacccctggcccaagggagcttacagccccatgaggggaccctgccctcctgccagtgccacaggagaaggtacccagcggcttgggggcagcagagggtaagcacaggatttctttagagagcatgtgaacaatatgcacagaaagcagggtgtgagcctggggttctagaggatgtataggagttggtaagaaagaccagctaaaaatgggaaagggatctcagggagagaaaatgatgtgaaaaataactccaggaatccctccgtagttttattgagcagctactgcaagccccacactgggccatcgcctccaggcatgacctctgaagatcccatcgtgctccttctccagatgagggaagctgggctcagagaggaccaggcccttgcctgaggtcacacagagcacgatgcattctgctctctgcccagcacatggcggggcaggggctacgggaggcagggggagatgcctagggctcaacattgaggagacacccacccccagagcctttgagtggatgcagtgccctaggggcccagcaggaagggggctggagtgtgcggcagaggggaacttgcgtgtgtgaggcagcagcagcaggctggttgggacccattgagaaggagctggtcagctacaggtaggagcctaaaccttgatcctgtgggcactggggagccaaggagggcttcaagcagaaggaggtgccgtcggctctgtgtgaggctggaaaggaaggtgggcacctgctctcaggcttcacctcctgtttcctttgattcacaggtccgtcagagccgccccacaccttggttgggctccccaggtcccctccaccttggcctgagccagggatgggggtggggaaggctctctgtggccacaacaccgtgcaacacccagggaggaagaggatgtggttgtcagggaaccggctcgagccatgagagccctaattatgcaaaatcattaaaaagaaacaggatggagatttcggctgattgagagctctccaacttttaaataattagggtgtgggggagtgggtggagatgggactgggcccatcacaagtgatgggggctttgagacatgtttctttaaacccatggcaggaataattactgtgaaatgtccttagcgattcagtcaattagaggggagaccccttatctcttgttagcgctctgaaggtggtgcagcggggtgtgtgtgtgtgtatgtgtgtgtgtttgcgtgcgtactcgggggcagcgattgatatggaatagtagattccactatcttttggaaaaaaatctattgtatcaaaaatttcatagaaacgtctaaaaagaaaaagaggaacttttaggaatggtttttcaggcttattaatatcccttccgatctatcgtttgcattcctgttccttgtgtccttaaaaaccctcagaaatgcccgagtacagccagcagtggggcgacaagggccagcgccgtttggctttgtttccactatcgattcaattgttctctcagcctttgatctttgcggtttttcctgctggaggctggtaggatacttggccactcgttctgccctgtgacacccagcaccggtgccccctgtgattctggctgaatccacccgcaagtcctgctgggaacctagaccagccctcaaggtctgggggagtctggtctgagagacccctgagcaggcgagggggtactaaggccactccggaagtcagcctgtgagaggccgccctggctcagttttggactcacctccgcctcacctccaagtgacagaaagcctagttcaggccagacagggttcccgccactcacctgggcaggtgctgggggccaccaggtcccgctgagattctcttccttgtttccatccatttagccaccgggggtccctcttctctcaagccctctccctgcttctcccaaatatgagtctctacccactgctaatggaaaggcagcacaacatcacccctttagggaatcaagcgttcgaagtgattttctttacggtaggcatcagagagaaaagggaactgtggttgatccttctttggcttaacaaagaaaaactacaaatatatatatatatatatatatatatatatatatatatatatatatatacacacacacatacagaaacaaagatgccaatttaattattattatcggggcacaaaacattatcatgtgagatgaccaattagaactcagaggttcagaagctcaaggtgactcccagggagattttactacccctaccgtacccatcctcctccacaggcagggaggggttggagggctcacaggagggagggagggaaggaaggagggagggaaggagggatggagggagggagggatggaagcagggagggagggagggatggaagcagggagggagggagggaaggagggagggagggagggatggaaggagggagggagggagggagggaaggagggagggagggagggaaggagggagggagggagggagggagggaaggagggagggagggagggagggagggagggatggaagcagggagggagggagggatggaagcagggagggagggagggagggagggagggagggaagtaagtcagtagggctgcagcactcatcgtgcactgggctcactctgtacagcatctttgctgcctgcggccctgcctgtacccagggtggtgccaggcctggctgcaaccccctcctcctgccccttcctgaaaagcgcccttggctcctgttgtagggaggagcaaggccagggctcagggaggtgaaggcgttcaaggccacacgaggggctcggggattgagaccctggcagcctgttctctcccagctccctctgcgagcggcctcacccttccttcccatggtgctgattttctttctggtcctcccttcaatgtgcccttgtggaaagaggaaagctcgggccactgagaagggcgcccctgtgaacgatggagggagattgaggtcgcaggcaggcctggggactgggggcgtgtggaggggtgggttgggctcctggaaagggaggcgcctactgtcagttttgagtttcgttaaacacctgccagcctgatagcattctaattccaaaatatgacaccacttattagtggataaactaggctccctccctccttcctgatcttgacgccaggactggaaggagcgaccacctgccctcaggatacccggtgcagtgccatggctttgagggcagaggtgtggggttgaaggctgccactgctcaccagaggctgtggagaggctaaggacagggatatagatctcctgagcttcaggggtctgcttcagagacaggtgtttggaggccttgctctcaagagaggtgggggggaccttcctcctgctgcctgctctgatttggggggataccagaggcatgaacataaacgtgggagccttttcctgccctgtaagcagcttccctccccctcctctcacctcccctcacctccctgcatgcagtggcctgggatcaggatggtgacacctgggctctgcagccctggcccaccgggtgctggaacttccttcctccgtcgggaggggactccagcctcctgcctgcccctccctacctccttgactcagatttcatcctccctgtctctgaaccctcagtggctcccgtttccctaatggtgacttcctcacccctctccgtggcccatgagatcctgcgtgggtggccccttgcgtccctgttccccctgctcactcctttctctgcctgcacggcccttggcgtgtccctgcctcagggcccttgcgtgtgccgtcccttctgcccagcacacccctctccaggcatcgccaccaatctctccccaacttcactcagaccttggtcaaacagcacctcccacggaggccctgttcacctaaactaccagcccccagcacctatctgcctgctggctcttcctccccagcacttgctgctccctggcggtggagggcgccacttagttttattgtctgtatctgcaaggagaatgttggctgcacaggaacagtggctttatgctggtcactgcatcatcccagggcctggcacagagtaggtgctgtttgcattggttgactgagtgaataaatgaatgaatgaatgaatgagtccatcagggcatccagtgggccctgcagaggggagctggacaggagttgtatttctggagaggcagtggccaggtacagtgtccaccttggacaggagggagaatggggtgctgccatttcccatgaggggataaggggctgggacagacctgggaggcaggacacgagcccttgtggctgagaggggccagcagggaggggcctctcgggagcctcagggtgctgtgatcagctctgcttccctgtttctggggtagagaccagagcaggccagcaggcaaggctgccactcagccggtttccatggggacagctggacaggttgtcataggtttaggtatttccagattggctggtgaatggctgtcaactccaccaccctgttctcttcccatcgttccctgggtctctctgtggcccaggtcctagggagttagtgcctggcccaacaggggtcctagtccccacgctacttcagccccagggtcactgctaccagtgagacagataccagcagaaatgagcttagagaccttgtcccactttgggaacttctgcagctcaggaaggccaggttatgggggcagtggggaggggacactgtctggggagtcctcattgcccactctgtcccagtctataattgtccaggtgggcagcaaaccgttgcctttagggaccagataagcaacttcctgtgcagagcaggtgctccaagaaaaaaggagatggtcagtggatggcatacaggagactgtaccaactctgtggcagtcagatttgattttgttacaaaccccatggcaatgaaacaaaacccacctataagtagggctcagccatgcctgcccaggacaccatgaacagagataactactggcccaaggtcccagggccagttagtgccagagccacaagcagtgcccagtctggtagaggacattgtccagcacatttgagaatgtcaggacacctttgcaatctggcattcagcatcaccagtagggggcagtagagggcagcacatcaagtatagctttggcttcaaatcccgactctaccaccttcttccagcactgactccccaggcatgggttttagccagctgctcctccattttcttggctatgaatggggatagtaatggctatttctgcacagcacagaatcttaccaggcttgttccctggtaagtgtttagttctaggtttgaggaatgaatgaatgactgaataaacagagcatgggcccaggtgcaaaacagagtcatccgtcgtgccaaccccatgggcgggagcagcgcagtgacggccattgcttctctgtctccacagtctttgaagagcctgaggaccccagtaaccgctcattcttctcggaaatcatctcctccgtgtccgacgtgaagttcagccacagcggccgctacatgctcacccgggactaccttacagtcaaggtctgggacctgaacatggaggcaagacccatagagacctaccaggtgggcaccacagcaggagacccccaatcccgggtcttttttccctatgctgagatccccatggagggggccttcctagccaggcgtggctttcatatgcccggtatgtaggtgaagacacggaggctgaagaaatccagcaactcatccccacacgtagcttggcagagggcaggagtgctcagtcttgcctcacagggagctttggatgtccctgagcaaggcctgcagtccagggcccaggggcctcaattccagggaggaaagagatgtgggaacagagatgagcgtcaggctgggccccagtggagcatgtagacgatggcttccctccccactccctgggagcctgcatcggagctgtaccattaaagagggttaagcgttgccctcccagggtgcatccgtaagcagtgcacgcagaggtgaactgagcacatgtttcctttccagatcctcagcacaggcctataagcctggagtctaggtgaagcctgggcccttcttggacagtattatttattatcttgctattatcatccattcagatatgttagggggtagacaacaaaactcatgtgatgttaaaataaaatgtggacttgaaagaaatgtgggatggcttcaaagctggttccagttaggtggggagatcagggaggcttcttggaggaggtggcatttgtgctgggccttgaaggatgggtaagatctggccgtgcaaacatgggtgggaaaacaccccaccagaaaccccagccggttcctcaccgtgtcactcctcacacatggggtgccacgtgcttgacatctgtcacctccattctttactgtccggtgacaaggagccatcatcctatttggtggaaagggaactcgggcactgagaggtagggagatgagggaggtgtctctcggctgggcggtgacagattcagagcccaggctcagagccctacgctttcctttcctccgtgcgaagacctagtaggaaagcgtcctgggtggcgcaggcctcgctgggaactggtgcagagctcagagggtgggctgctctgatctgacctgggccccagaggaacagctcacgctcctggaagccacacacccacaaggaccgctatggggaccgcctgtttgtcagccacgtgtgtttacttgagttcttgcgactgccccagctcctccctcaggccccctcctcacactgcacaccccaggcaggactcagccctcctctgtccctgtgggaatggcagagaccccagactaggagagggacaggataagcccggctcaagcctgcaggagcaactctctggctccctctggaggcagctcagggaaatgaacatttccaaccccctccggccccttgtccggtcacttacctccatccctgaggtcagcaaaggcccatgaacccctgaaactacgtggaatgtgttctatgagcattttcagggggagggggacacagctttctgaaattctcatgaaggaccccacgaaggaggggaatgactgttctggagcgtgaggccgtaagctgggcacttggcatctggcccagctgacctattgatgctaaaataatagcaataactacataaaagcagcacaacaaccaacattttttggtggcttgtgatgtgctagaaattgtgtgtagcaggactgcgttcggctggtgtgcggtgcttaacaaatcggggctatttttctcccacaacagggagtctggagagggcagtccaggaaggtgggggggctccatgaccccggcagcgccacagtggttccttctgtgatccagtccaccatcatttgggcgttggttttccaccttcacatgtggtacctcatggtggcaaagtggctgccacacctccaagcactttgcctacattccaggcaggaaataggaaatgcactagatctcacccctggggtctgttgcgtgtttcactgtgattgtaaaatcttccccagaatgcttctcagaagacttcttacacctcattgtctagaatgggtccctggcagccaccatagtggctgggaagattaatggtttaacagcctctgtggttgaagaaggcaagggtgaaggggctggggacggttgttgaatgagccacactgaggtaagtccataatatgctttgcctcatctaagcctcccagctgtcctgggaggtggggccggtattctccccatcccattttattggaagacaattgagttaaatggcaaatctgtgacagagccagcaagcagcggaccttagattgacagtctttctccagagctcttcctcaccctgccactagagggcaggagatgcttagtgcacggcagagagaacagcatgcgcatttggacgcgtgcatcaccaaggctgctgggagctgagtaaggaggacacacaaaaatgcagagccgggggtgggacacgaacactaaaacctgctgccattcatcccccttgattttagttgttacacatactgagccagtaccctgtgcccaacacagtgctagaccctggacccagagagaaggaagaacctcggcctcaccctcgagggtcccagacagacaggaacacagtgaccctcagcttggtggggctgcagcccaggggcccaaggggaaggcaagggtcaccaggaggacacgggggctggggagggatgagcagggccccaggcgggagtcaggtagccttgtctaaccatcctgtgtgcagtgaatagcaggcccttcctcccaatcctgcttcccctagtgccactctgttttcctgtgtagtccttgccaccatattagtcagatggctcagagaaacagaaccaacaggatggggatagagactgagaaagaagggagatttgaaggaattagctcacgtggcatgttctaaatctgcagagcaggcgggcaggctggtgacccaggggagagtgactatgcgagcccacacgcatctgttagcggaatcccccggtcctcagggaggtctgtctttgttctatcagggccttcgactgattggacaaggccccccacatgatggagggcagcctgctttactcagtatatcagcttaaatgttaacctcccctacaaaatgtcttcacagaaacaccaagtatctgggtaccttggcccagccaagctgacacacgaaattgacgttcacaccacccttcacattttctgtgttcgttggagttgttaatttcaactcctgggagttgaaaccaggctccatggcacccagttaccttcccttccgcacccagagggcagagcccgtgccctgttgtcctggcagctccagcctcagcagagggctggcactcatgcggccctccgggtacagggcttgtaggaccggctgcagtcaggtggatgcaggtcctggggtgtcaccctctctcctgtggggtacgggaatcctggggaagggtcctggtcagcctcttagaggctgtgtgaccctgtgagcctcagtgcctcgtgctgtggatggatgagaaacctctgtgggttccctcttcccctttcttgatggccgccaccctgtgttctcggagatcattaccctcaaaaggcctgccctgcacttaatgccagaaccactgtgaggttcgccctcttatcactttaagtttgaagaaactgaggctcagagagatgaaatcacttgtccaagatcacacagctgggagggcagagccaggatctggaccccaggtggtcctggcccctgtgctgtgagcgttctgtttgtcacagtggactctgctccctggtgctactcccgtctctggccacagctcagaggtcagccgtgtgcctggtcgtgggcccccgataagatgagcagggctgtattgggctgtgtcacggtggaggtcagccgtgtgcctggtcgtgggccccccgataagatgagcagggctgtattgggctgtgtcacggtcggggtcagccgtgtgcctggtcatgggcctcccgatgagatgagcagggctgtgtcgggctgtgtcagagcattcagaccctcgctgagatgagcaggtctgcgctgggccatgtcagggcatgcagaccctcgctgctctttgagacccttcttgtggaagggccaggatggtcgggacgccccgtccactcacctcatcccttatcccaccaggtccatgactaccttcggagcaagctctgttccctgtacgagaacgactgcattttcgacaagtttgaatgtgcctggaacgggagcgacaggtaagccctgacctcagcccgcacctcacctcaccgtagggagggtttctgccctgcaggggtctgggctgggattccggtgacccgcagcatggggctactcagcctcaatgggtccaggtgtctgggtgaagcccacgctttccagagcaggtccaactctcagcgctcagattcaaggggcaggacatgaaattcttcatcttctgtcactgaacctcacagccacgttggcgcctgccctatgggcagtagtgggaacatgtttagttaattcagggtccccggtgatgtgctcccctctcccagcttgtcgggggcgagggctatagcccagcacccggtcaccatcatccatccacacctgtatgtcctgagacagccctgcacccctgtggctttgaccatcggtctactcacccctcctcccatcaccactactgtctccctctcttcctggtgacaccccactcgggcccgctgaggctcaggggcaccttggagctcctacaccctccagggcttgtcacaatccacaagtccagccgtctctcaaccccacctgcctggaaagtggcgccccagtgccagaagtgagttcctgtgtctccctagcctgggctcagcccagggcgggcatggacaagggggctgtggcaggggctcctgacctgacctctacccgtgggtccttacctctgtgtctcttctctgggattcttcctccattctggaggtgggaaaatccctcttctgccctcccaaatcacatcagctttgtgctcagggtcctgccaggcgtaagattctgaaatggacaagcctactctccatctgtgagtttcgatctcagaagctgagaggtggcctctcagtgtctcctacagctgcttcctcaaggacaggatgcctctttgtccagccgcccagattcagaagtgggtctccagatgatacacagtgtggagataaagactacactggctgctagatcagaataccacctgtcaggagcccatgtactgtcacctcctccccgcagtcctgtccagtgtggtgggcaaggagggtggagtgagagccagcagccctgacttgggcatcacctggtggggggctgtccaccctgtggatggcatcagtcaacatgacaggtctgggctctcccagacctctgagggtggctggcactgtggtggtcatgtgagagctgccgcactatgactctctgtggctctgggcatagggctgggaccatcagggttggtgtgtgggatgaggggagggctggacatggcagagacaggaccaggagggagccccctggaagcagggctggatccaagtggggggccaagtcattgtgtccagggaaggagatttctgagagagttgccaacatcctggagctcccccagcccgcaggggtctctcagcagagcccgagctcaggcaaggggctggcatggtgatcacagggggccactaaaggatgcttagaaaaccaggatggaggcccgacccggggctgggctggcacagctgggtcagcaggacacaggaccttctctctaggccctgcccccagatagatcccagacacccccagcagacagggctcctcccatgctgctgagctgcatttggggttccctggtgcagtgggtcccaagagggtctatccaaatcggacgagagggacctgcagctgtaacaagctgattccagcttttatgtgcgttttgcggggtaggtccccgctggctgcgacccactgcccgtccttccttcaagctgccaccagggggcacccgcggccaggtgatgcctgctcccaggactggagaagccgccaagcatccccaggctgacagtggtgtctaggcctgggctctcctgtcctgcctcccacccgccacttcctgcgtgcactttacacgccagccacgccctgtcctagtggtcccccacccgcctcactgtctctcgctccacagctggctctgctctgcccggctggaacctctgtccttgtttgcctcccgcaatgggtggggtgccctggggggctactatgactcaacctgttctgagcccttcactggggacctcaggtgtgtccagtggctgtgggtgtttctagaaggcatagaggtgtgccacctcccagttcactttgagcactgttctgagaacaacatgccccatggtcaggggtcccaagataaacagaccctgggtcctgccttccagggcctcagaggctcaggagagaagcaaggattccccccaggttcccacatccttgcagaccaaagcaaactcgaatcctggcaggctcccagttgctgccctcttattcctggtgaccccctctgacagttggtccggcccgcagagcgccgctgctgccgcgtggtggctgcccgatggcccctgccgtggggcttcctagcaccggcagaacgcagatgggcagcgtgctgtggagaggcagcagctctcctgctggactctctcagtctctggtccacattctaccctcgccaccgtgtgcttgaggaagcccctaagtcagctcggctggaaagtggttctaggaaactggccttcgtggccgctttggggatgagaccatgtgtgatgccttcagcaagatcccagttcgtatgcgcaggggtgccgcagtgatcctgcgtggactatcctattggcaggcctgcccttccccaggttacctacccggaggaatcccgcaggccctcccacaacaggcttcaacgccccctcctccatgaagttctccttgatctgtcctgcctggggggagagatttgtgccagccgagcgtgctcgggtgcgggagtcaaacacacctacacttgctctgaggagtcctgggcaaggctcccccaggggcccatgctgtatccctagggctgtttttttctctccggccgttttcttctctccatgcttccccatctccgctcctccctgcttcttcttacacactggcctcatcctctccctcttcagagatgacccccaaatcattcccctttccattatcctcagccagccaacccctcccagggactgtgtaaaactctcatggaaggatctgattggctctgtgtgggtcacttgcccactttttgcaccaatcagcatggacagggatatcacatgcccaagttggccaggccaaggggcgaggagagcactgtgattgaccgctcacagggatagggagtgcagtggcgccatctcggctcgctgcaacctccgcctcctggagtcaaacacttctcctgccgcagcctcccaagtagctgggattacaggcgccacgggtggcgagggcaggagcctttctttccccaaaggaaagaggagcggagcactggggctgaaagcagccggcgttgtggtcccacatgcagatgaggctaggagaggtgaagcagctcccctgcccttttccctgttaagggaaccttctggaatttaagaaacctgcctgaatgtgaggaatggctctcatggtggtgcggcctggtgctctaggatgagaggggcccctccctctcccccagagcacgtgtcagctgaattccacacccgaacagggggaggatcaggaactgtgtgggttgcaaatgactttaattatgtcgctctccttccactaaatggatcagaagaaccagcattgtgtgaaatcacccaggttcattctgtgaactgttccctgaagaacaaagggggctgcctccccactgtgctggcgcggggagggtgtggcctcccccagtcagcctgtggcgcctgggcagggcccttctgtgggactcgttcacccggcccccctcgcatgctgcttcccttgtcccaggctctgagtcacatataaagcgggtgcggctttggtcacatggacgattaggatcgaggagtacctggtaaataacaagaagcaaagtgcctcaagcccagcactgtgcggggtgttcagcctatgtcccctgattcacgctcaccaggggctgcgttcccttgttgatcccagttcttatagaaaactaagagagtgcgcatgtcagggtagggcagagctgggatccggacccaggcggactggccagagcccaagcccctgactgcagtgccggagctcacgtgtgagcttttgtcctctgtgcataacccctggagacccagggatccacctggttctgtcacagagcagtgtcaccctcaggaagcccagctcagcttccaaaaggaaacaggatttcctccctgaagagccttcagcaggacaacttctttatggtcgcttttcgtaacatcctcttcctccccagttaccttgcacctcacagctgctccagggccctgcagaggccaaaccccaaaaccctccctctgggcgcaggcccacagaactgtgctttctctcctgcctcttactatgtggatgaacttacccttcctcccaccggcaggaaccccttctccttaggagcagggagagcagagaaatggtgtggaattctctttagcgggacggtgagggcagcgagcccctgcacgtcagcactgctcgccccgaccctcatggcgatgcatgtttgtttattcgcccgagtcctcgggacaggcgggcccctggagggaagcagggcctggtggttttctgtcccagctgcttccatgtctacctcctgctgtggttgcacagtctgtttggaaggccagagctttctctcctggactaacagaaattacaggagggtcttttcttttcttttcttttcttttttcgagacggagttttgctcttattgcccaggctggagtgcagtggcgcgatcttggctcactacaaccttgcctcctggattcaagcaactctcctgcctcagcctcctgagtagctgggattacaggtgcccaccaccatgtccagctaatttttgtatttttagtagagacagggtttcatcatgttggccaggctggtctcaaactcctaacctcaggtgatctgcccgccttggcttcccaaagtgctgggattacaggtgtgagccaccacgcctggccaggagggtattttcatgatgattggggcagaggataaaaaggatcttagctcctggccccaaagtctgcatgttggtggcagctgacatgtgagggggtataagagaccccaagatacaggggaatagaggcaggtgtggtttccctttccagggagtgatggctctgtaggctctgggattgctttttcatttgtttgttgttttgggacagagttttactctgtcacccaggctagactgcagtggtaaatcacagctcactgcagtctctgcctccccaggctcaggtgatcctcctgcctccccaggctcaggtgatcctcctgcctcaacctcctgaatagctgggactacggtcatttttaatttttttttgtagaggtggagtctcgctatgttgtccaggctggtcttgaactcctaggctgaagcaatcctcccaccggggcctcccaaagtcctgggattatgggcgtgagcccccacacctgggcttatttctcgagaaggggcttgtgctcctcctcacctgatgcctctccttctcccaccagcgtcatcatgaccggggcctacaacaacttcttccgcatgttcgatcggaacaccaagcgggacgtgaccctggaggcctcgagggaaagcagcaagccccgggctgtgctcaagccacggcgcgtgtgcgtggggggcaagcgccggcgtgatgacatcagtgtggacagcttggacttcaccaagaagatcctgcacacggcctggcacccggctgagaacatcattgccatcgccgccaccaacaacctgtacatcttccaggacaaggtaaactctgacatgcactaggtatgtgcagttcccggcccctgccacccagcctcatgcaagtcatccccgacatgaccttcacgaccgcaatgcaaggaggggaagaaagtcacagcactgatgaggacagctgcagaggtggcagtgtgtggacacaggaagtttgggccccctccctgccccagctttcctaggccagaattgtgtttggcagtaattgtctgtttaaaaaaataaaaaggaaaggaagcgttcaccgccacaaatcataaaatggacatgactgtggagtcttacagttcagggttctttcattcacgtcccttcctgtctcggtctgcggtctttaccacatcaataggactttttatgcgtccgggttaatttttcactccagtgcgtcctgttgcagggaccggagctgatgggagctgcttctcccccatgcctcactggtcccagatcagggctccagggacagatgatgagtctcaaacgagccagccaggggttcttttggttataaatggggcaattcgccctgtctcagagctgatgacctcaccgttgttttttggatggtgaattcatgctgagaatttgcagatgcaagctcctctcctaggtcttctgaatgtcttgaaacatcccaggtcccaggtctggtgcggtttcccgagaggagcggagtggggtttgtcttctgtgtgcctgtgtcctcatctgattcacctgccatttgctgagcctctgctgtgtaccaggcgtggtgctcagccctagaggcagttgacttaccctctgcagccctccctgccgcctcacccttcagcattcactgggcaccttcccggagcggacactgactcccatgcacgattttttggaatcttcctcctgactgtgaggtgggtgttcattcatttcctccataaacaccaacttctcgaagcgtgccaggctctgggctggatgctggggataagcgggaacccttaggatcccctctgtccacgagaagaagctgaggctctgagcggatgcacaggtcacccatggcaggtgccgtgcagtggtgtcaggaacccgtccgggtcttcacacaaggttctctccagtccatctcgtgggcggctcatgttagagcgacattcaaatggaaggtttggaaaggaatgcctctgtcttgtgaagtaggacatggcagacttggcgacgacaagggtccaggagaactgagacgcaggatggaagacagagaagaccccccggagctcctcgctctgcttggtggcttcaggagtgtggccctccccaggactccacttcatcctgggcttgcaccctccttgagccaatgcactgaactgcctttgaaaggaaattgcatgttctgaccattttaggatacctttactttaaggaccacacagtcccagaggacacatccctcgggaactctgcccctctgacaatgagggccacagagaaggtggtgtttccatggtagatgctcctgttctggtgataccaaacctgcccacccctctgagtcgtctttgctcatggacttgcagcagagccacgtagtttggcattttgattcagaaagtggggagcagagacccagccaaatccaaactttttttttggttttgttttgttttgttttttacaagatataacataacccaggaaacagacccagctgaggttattctcagtggattacagtatacttttgtgtgtgtaaaagcacaaagtgcatgtgtactcacttctggccatataacatttacacagggaaatggatcattgatttttttttaatcaacgtgaatgaagaatgtttgtttatatatcactataaaatccagttgacctggacagtattatatgtacatatctattctaattaaatttaacaatcaaaggattggattacttttttcccccttgtaaagaggttcgagaatgtggtcaattgtatagatagcgtgttaaagccaaaacccagctctgagggccttacccattacttggatatttgctacgatccatctccctttgtgagtcaaatgttaagagaagaaacttgtatttgcagctagaggttactgtcacatcatagatttaacatttaccatcttcaaagtacaaatcttacatgtccttcaaaaggaggtcttaatacagttcctagttccttacttctgttttaaactttgggtaccaaaccaaaaagaagaaaaaagaaaggaaaagatcttctttgaagaaaagtatgtctctggatccctggaaaataatgatgtccaaagcaaattgtgaagatcaaatgtgtgttaagaaaaggtgtcgaggggagggacaaaaccagaaacggtggaaggaccagtgtaatagtcacagacttgcatcctggctctgcttacatttcctggtactctcgaatgtacgggcgttcacatagtcattgtgaagttgttggggtttttttggttttgtttttaatttagctcttctctgaggacgaagctgttggtggtggtggtggtgggggtggtggtgtgggatacatggtggtcaagttgtcagccctgatcagtttggactctgtaactcataggtgcattctttttttctttggtgtctcacaaattacccaattgttgaataaaactataaatatgttaataccagctttttccaataaaataacaaatgttacatcaaaaacga

SEQ ID NO: 342 - DNA, 432537 bp, Homo sapiens
acgccctgcgcgcgccgagccgggagccggctgcctcgctttgcgtgaccgcggcaggttggtcctggagcagataagcgcagaatatttaggcgaaagcgagaggaaggggggagcgcggggcaggaggagtacctcggccaagaaaattatgcatgcgttagggaagctctgagagaatggctgtggaaggtaagggacgcttggggcatttttaagctccctcttaacccgcgcaccccaaggcacacatccccgatgaagcttggcgatcgtggggaggcgaggaaagggggtggcggagagcgggccccttcctcctccacctcttggcactcacctgcgccgccaaggccagtaggcgctttaattcagttgctttggagagacgtgaagggtaggtgcgtaggactttgaggtaggaggtgtggagacgagtgtccctgatgcgaaacgatatcctggaaatggggggaaagccggaggatccggcatgaggttttggccccgagatgccctttttccctgccccctccctccggagcaggctgggtggccccggggctggggatgcttggttggcccccctcacgtgggagaggtccccagcccaggtgcgtcatccggaagcttggactgggattgggtcgagggcccttcgtcctatgcacccagcagcggcggccgcagatgtacccagagggtagaggtgtccctacacctgtctctgcttatacagccagcgccccgggcttagcaaagtttacagacatgaaatgtaatcagccagggaaaagaagtgcaacaacctcttcgatttgggtgaatccttttctttgaagatcactttcttcttacagtcttgagcttcggctttgcagttttgaccgtaaagtcctgcctcccttgaacttcctggttgaaagcagggtcaggctgttcgtgagggatcctgagtttttcatttcaggttatcttaccttggaacacaaacttccttgtttaggtagtttctgaagaagaaaaaaaaactgtggaccggaagggtttgtgatgtcacattagaggtcaagctgtgcctgaatgatgaaatgattgtgggacgaaatgggagcctacattcacctgcagaattttggtttctgagtgcagtcaggtcagagggcgtactgaagtaggaagaggagggcttgcctgccagctgcttcaggcgccttgccaaggggaaatcagcctattccttgtaggctagagacgagaaggccacgaggctggcttgctgctccctctcctccctgccccaggagaaagaaattgaactaatctgactcttgctccccttataacgactgtcttaacaacctgaagtagcaacaacccagctcctatactcagcacccataaactcgggaaactcttgcctttgggctatctcaggttcagagatccacagccagccacttccagctttcctaactttattaacaaaaatgaaatcctctctctctcttacaatcaagatttttctaggttttcttttctgtgcaaatgtaccagtagggtgagaatcttttttttttttttttttttttttttgcatcgttatgcttgatagtcaagacttcagatgccaaagaacaaaacaaaagccgagataaagttcatcttgagcttgagaccaaggatatgttgacctactccttaagtgtccgttctatgtcacccatcaggtgacactgattatgatctctcgtcttcaccactcctgtgtccccaagacagggacactcctctttgttgctagtccacactgttctcgaaaacaatttcttgttccctgtaagaagtataaatttgtcttatttcttgcgtgatgggtgattacaccagtgaagccagactttacaaaaacaagaacttaggaaggaagtacatgtggactatggagagtttattttctagtgacttggttaaagtacctgtctagtaaacaggagatcctgagtttgaatcacaatgaggtctcaaagaatgaaggaagtattttaaactttaacttcaaatatgattcctatctttggtctttgcaaagatatcagcctggaccagtcccttcctggttactcctacttggtctttcaagcctttgggaaaatgtcacttcctctgggaaactgtcccagccctcctttttcttctgccttctcagcactctttccagtctatgggaagtgcctcctgctcacatttatcttaatacttatcatacttaatctgcctcttactagactctaacccccttgggggttagacttggactttatattcctagctcatagcacagtactttgcccataataggtactcaatgctcatgaattgcatggcaaatatattcatggaggttttgtaactggttctataagggtacatggggctttcttggaagcctaaatgtgatacaataagggatttctgacagatttgaggatgggagatttttttttttttttttttgagacagagtcttgctctgtcgcccaggctagagtacagtggcgcggtctcagctcactgcaagctccgcctcccaggttcacgccattctcctgcctcagcctcccaagtagctgggactataggcacccgccaccatgcctggctaatttttttggtatttttagtagagacggagtttcaccatgttagccaggatggtctcgatctcctgacctcgtgatctgcccacctcgaagtgcccttctcttcagtcttttgtcttgatgcccaaaaaatcttttagaacagtttacctctactgctgggtgacattgtccctggacacatttgggatatgtaggaactgctgctgggggctgctgttggtattttgtgcccatggccacagataataaatgtcctgcagcgcatggccatcccgtataacgaggccaagccatggccaagtaatgatcagtttacccaacttattgagaaatgctgcttcagagaataaggagttttgccagaggaactggaatagaaaatacagttcgaattgcttaacattctaagctttagtctccacatctggaaaaaatgggctcactactgctttcctcctgggaacattgtgaggatttttttttttttttttgagacggagtcttgctctgtcgcccaggctggaatgcagtggcgcgatctcggctcactgcaagctccgcctcccgggttcacgccattttcctgcctcagcctcccgagtagctgggctacaggtgcctgctaccacgcccggctgatttttttgtacttttagtagagacagagtttcaccatgttagccaggatggtctccatctcctaacctcgtgatccgcccgcctcggcctcccaaagtgctgggattacaggagtgagccaccgtgccctgctcattgtgaggattaaataaaggagagggcttctagaagggtgtctggaacctgcatcctaagtaaatatcacttgtactctcatcccttctcttaggaaaagctatactatttggcatgtgttttatatcctgaattttcacttattcatgccagccagtttttctaattagtaacaaattagaaggttttttactatgtgtaactttttcttaagtaaacttgaatttgtaaaagtgttactagcaagtagttcactcattcactttgctgaacctgcagccgtgtgtttaagatgaaaaagaggtgccctttgtttattgttttgtaactaccctgtgttatgttttcttcttagtttatttgcaacatcctatttatgtctcctagtctgcttgtgacccatgctttgcatttatgggcagcttacaggtatgctttcccgccacagaacagggtacgaccttatggtctgcatttggattaggattatactggcatacattgcctttttttaaaaaaaaaaaaaacaaaaacaatgtcttgtgaaataatttagcaggactggggactaggacctcttggaaggaggtagcagggaccccaaactaatccattctctatggacagactgtgtatagacggttaaacctattgatgttttctaacagaaatgggttgcaatattattcagggagaagaaaaatgtggattcattggggacagtgtcgtattcatctttgtattcatctctgtattccagggatggcgcctggcacttaggaggcccacagtcattgtttcatgaatgacatataaatgcacgagtctccagagctagagaaggattttttttttacccctcatccccaattccttttcttgctttgtcctcagatatttatgaaaaaaatagggaggatggacattgtacatggtaatttctattccaggtctaacagaatagcacctctcatgtggcagaaaaatgatttccaatattcagcactcacctctctccccaagaaaaacatgtcaaatgcaagactgtgtgctcttaatgacatctatattaagggatctgaattttccatcataaatgaacatggtagcttaccaaatatcttctgataagtcattcagtgctcaggttctatgttttttctcctgtagaagagtgaagaaactacacatcaccaaaatattgtaaggctaagtaataataacggtgactgggaaaatgggaaatgagatagcgtcaaacgtttgtgacaaatagaagcagtcacggtaaacactgggctttgcagccccataaatgatgactttgtacccaacttgaactcagaactgcatcacagagagtaaaaggagtcacatgggagataaaaacatcatttttatcacaagcttatagtgggttatttttttctgactttgggttggagggtaagtgggcttgctaatattgtatgcagcagtgaacttacccgtcatagggatgcctccctctatgctagtggtccttaacctttttggcaccagggatcagattcatggaagacagtttttccatgggggatggttttgggatgaaactgttccacctcagatcatcaggcattagattctcataaggcatgtgcaacctagatctctcacatgtgcagttcacagtagggtttgcactcctctgagaatctaatgcctctgttgatctgacaggaggtagagcttgggtggtaatgcttgcttgctcactgctcacatcctgctgtgcggtgtggttcctaataggccacggactgataccagttcacaacccaggggttggggacccctgctctataccactggcagctggagagcagagagaacatgggctcctgcagcaggcaggtgggacccaaaggaagaggtggggaacctatgctttgtgccttttcacagacttgctcatcagagagttgatttctcctctcctgaggaggacccagagggtaaagagggagaccagaagtgtaattctgatggatttcccttcatagaacacaagaagctctgtcctgcctctgtgtgattctcttggtgctagctcacctatgctttcctaactaccttttcttgttgggaacatcattatgaatgtacctcttctactggtggtactttctacggcaaggactatgtctcatgtctcatccttgaagcttgaatgaatgaatggagacaaatgaaggaatgggtgggtttatgactgcttttgattcccacagtaactcccatacacatttaatgagaacttccaactgtgttcctctacagagcagatgtcatgaaagcagtgagacgatggacaagtttccctcataggtacttatccctgcagcagcttcattgtgtgattgttaaactaattactccctgattctctcccattcacttattcctgaggatctttttttcttatttttattatgttctctataccaccagatctgactttcctgcaccagagtttctattgatcactttgttttaggaaggagaatgacggctagaagttcgtcattgaaaattccttccagtgactgtgtgaacaagaatggggcctccaacctagtttgaaacttgctgtggcagcagttcctgccacccccatctcttttgtagccctcttagctagttcggacagggtttcagtctaattgtactgttgtatttcctagcccagcccttcctaattccttttatcccaccctttctttctcatctgccttgctgttttctcacgcctgaatgaagaaacaagcgctggtgctgagaagcagaaactgggaaacctttgctggtgtagctgtgttctgtaatgctgagtcacagtggatgacgtggtgacatattacaagggtagggggagctggggatctgaagcccatgcttgaactctggcgagtgagtgtcagctgttgtgcatttaattatgagaaaggggatattgcaaatgctcattcacaggcattcaagcagatggtgcctttctgttgataagcagtagagtagcacccatgtacaaggaactctacgagatgtggtggggagtgtagtaagaaagggagcttagcccactctgacccctgccagtcccggccctcccctgcagcctccactgggggaaggagacaagagaagcagattagactgaatgatataagtgctaaataaaagtgcaagcaccatgacgtgggaggtctgagaacaaatggagcatttagttctgagctgggtggggatagcctaacgaaaggggtagcattgagtgagcttttgagtaggattttgatgggtgggaatcggggaaagggcacaaaactgagtagtgtatgtataatgcatgcttcttaatggatttcccccatgtcccagggatgtggtagtttagccctttataggaaggaaaacgaatggggagcctcctaactcatgtctggtaaaatccttttcctaagggctctattatctgcctggccaaacctgcagcattccccacagtccagttggatcttgcatatggtccttttgaaaccacaagagcaagcgtggaaagctgctctcttgtaaatcaagttgattcctccccagttttctgaagtggaatgtagcagcaccacccgctctgagctggctcatgagagcaaacttggctatatttagtctgatttttctaaagtgtgggtgcaagaatctgcttgtacagcttgcctcccgcgtgaagagcaggacaggacagcagctgttgggtgacagcggtggcccacctcactgccttcagcagcctccttcccagagtgctggggctattggcaagttttgttcctttgctcctccctgctaccctcccttgctgccgcagaaggtatttgtgttctattcggcaaatcctgactctcaagtgatttgacagatgtttgtggattggctatggggtgtggctctcagagctacagctgcccttgagacctggggtacagaatgggctcaggcctgctcatggcttttcactgcctccacagtgcaggactctctcctaggggatcatagcagtcacagtgttcttaaatgtggaagatctgcaaccaggctagatgtgaaccccagctccgcacaggacctgctgagtgcctgggtaattcactcaacagctctgagactcctttgcctgtctatcaaatgagaatattaatggtaatgacctcataggcatgttgagaaggttaaattagtataagggaagctcttaagacctggtttgtggtaggtgctcagtaaacactgagtaagatgttagacaagatgatagtgatgatgctgtctgtttcaccttgtcttcctgccatacttatgaaagcatctaagacatttttatagcatttttatagccccatgatattacagtctggcataatagtgtgtgctcaatgagggaatgtaggttatcagagttggaagaacaccaacaaagtgtaattgataaaatacaaggcatcctcagcttaaaatgtattatttggtgtattcatgatctgactctgtgcagtcatgaggcaacagagggaagtaaatgttatgattatattcactaaagactcatcacttacataatttttctctaccacaaatttacttgccacttaacaccagcaattttgtaggctggcctctctctgattgtctgatcatcacccatccatacaatatgtatgcaaagtaagttgattacaaagagaaatttcagatcttgcaaaagagaaaataattcatggactccatgaaagtgacattgggaaactgctggaatcatatgccatggcccaattaagatctgagttaagccaaataaccattaaagaagagaaaattgactaagatattgacttgataggcattaaagagaaatattaggaccttttagggattaagggaagtctttagtgaaaagagatgctctaaatattttggggaaaaatgatctcctttataatcatgctatgaaaagtcaagtatgatatgaaagatattttgtcctgctgacataagtcctgttgctgaagttatataacaaataaaaaatggatttttttgttctaagaattaacacatactttcaattataacctaaatttggttaaatatcagataaacttctccctttctcttttcaagataaagtaccattgaaactcactattaattttgaaactctagcccccatttcaagtgtattccttttcttcctttctcactctttcatgattttttattggtatttaaattggttttaaactttaggttgtttagatacaatttacacacagtaaaatcagctattgtagttctttaagttttggtaaatgtatagtcttgtaaccactaccaccatcaagatacagagcaatttgaacaacttgtaaagtttccttgtgcccctttgtggtcagtccttccctctacccacagcccctgacaactactgctctgaagtctgtccctagacttttgccttttctagatttcatataaatggtatcatacactgtgttgccatttgagtcctgtttctttcactgagtagtaatgcattgaaattcctccatgttgttgcctgattcaatagttcagctcttttcattgctcactaatattccatggaatatctatacagcagtttattcactaattgaagtacatttaggttgtttccagtaattggtaatcatgagtaaaccactaaaagcagttgcttacaggttgtgcgaacctaaatttatttctcttgtgtaaatagctaggagttggatttacaagtcatatagtgagtatgttttacctgtattagaaactgctgagcggttttccagattgacggtgtctcaaatgtgttcttttatttggattttttccctgtgcttatcttctgataatgacaacctcacaaggacaagagagttagattaatggggctatgcaggtagttggaagggattagaaggacacagttgtccagaggtgagtttcttgagctatgcagctacaagattgggcagtattactatggtagatattccccttgattaccagttcagtacagacatcaagcatggatatagcccagaaatgccacttgttttggcatacaaaagaaagcttctaaactttatcttgtaataagaatttgtcatcatgttctgttttgtgattttgctgttgtagaaaaacaatcagataaggaggacaggccagggagagcttattttgggggaaaattaggcaagacaggaaagggaagactaagtataagagatcacacaagatgaatttagctagaaagagaaaaacttacctgtccctgaaaggaattggtcttgcctgccaaggttggttatagactccatctcgtgaagcctgagaaaatgttagttgaccgtttcttgtatggttgagttttggggatggcaggggtgaggcttatattttgctgtgctgtgtgattctgatttagaactgagtcttgcgttggatgtccatttatacaatgggagtagtgcttggttcacttgcaaaggccacattttactcagccacatattgggtttggggcctgatagtgggattgcttccaagtgcaaaagactatgtgatttggatgctgacatattgggattttccagggcttaccactggtctctgggaccatagaatggaatatttgaatttagaaaattcaaatattcaaaaattcaaatactacagaactcctagacaaacagttgccctaatacttgttgtctgaggttggaaatgtgaacatttcagttgagggttttgtttttgtgtttggagaatatgcctgtgcagtacatggaggaaaaacatgattattaacaaggctcccacagatgtactttgtacttgattttgttggaagtttgtttatttcctgcttgatgaccagtgatatttttggtggaagagaaggtgaaactggtaaccaataaatggggacggggacagggatggatggagttggagacggcatccaaatccttgcctcagtcgagtcattacccttttgttctctttccatctctgagagtagcaccaggtatgtatccgtgctttgtgatgccttagctcttgcctttcatttttttctgctttctaagctttttactgagcattttttttctgctttctaagcctttttacattgtggtcgtttagtagataattctgcctggataaactatgggactgatattttgtgttagtcatctagggaagtatatgtgggtatagcattcacttcccatcagttagaagtacactgagtacctactatatgctaggtagaagaaatttgattcataattagataatagggtgggtaagcttaggaaaaccaagtgtgccagagtctgagatcttaggcagtgtttccttagacgataaaattctcctggggcacttgataacatccatattcctacttcccaccctagggtaatcttttcaggtaaatcagaaatggggtcctgaatctaacatgcatcctgattcattcttactaaacttatttaggagaccctgactgatctagggatagagtaagatcacaagagggaactgcaggatttcatgagatccttgactgccttgcaactgcaggcataatttgtatatggaaattatgtgtattttcatggggagagagactgaagctcttatcctattatcacaagggctaaagacagtaatctctggtccatgagcacatgtatttgccttttttattctctaatctatcagcagtgcctacaaccgtatctggcttgtagaaggcactcgactatttgttgagtaaacacaagaactaatgttattttgtgattcctctgagccaggatctttatgcccactctctaaaacttagatttcgtaatgcagtgagctctatgagtttttctcccacctaatcatcgagagaatttagctccagagaagataactaattttcctgaggtcacactgctaatttgtggtagaacttggctttgtagcgatgtctgccgtatgccagagtccttgctttttcactctactgtgttgctttccggtctgtcaaagttcactaatttggttctgatttgctagttgtcttttggaaaccttggttacttaagaaaaacagcattataataaaacaaaaaattacttaattgggctctgcaatggggaaaattctttggggtttttggatcaaatttttaataaagtgtgtatcttggtattagctttctacacttttgcattctctttttatggagccctaggtctttgggtttttgttgttttctcatgctgccttccaaattcacccgtaccccagcacacaattagtgtaaattgctattttatttgaacagtaagtattcattgtgcacttgctataagctcaacacagtgaatgacactgggaaatacaaaagaatctatggatattgaacttactgctcttggaacttacagtccagccagagcttcaagattcctgtcatatatgtgtcacggcaaaacaggttgggacatgggcagggtgtgtgggcaggaaggctgtctaggggctctgctctgtctatcagaggggagctgccatacacacagccatggtcctcccactgccctggacttccctggagaggttactatatggatttgttttgttttttaaatagaatgaactaactgaaatggaaagtttgctcacagtctggagagattgaaaaagcaagggggaagctgaagtaatgtaataatagggtgataagggaagataaacgaacagggtgggcagatgttagaaatgtttcttaggtgaaaaagaagatatgattttggattgtttagttctagggagtggtagatacataatcgcttccaactcttcaggactctccactgccaataaaataaaatccaaacctcttagcattcagggtccctcccagattgccaggatttcctgctccaggctgatgtcccactccttccccttaggaatcttcctaatcttcggttaagcccagctactgtttcctgggctctcagtgtacatttgactacagatgatagtaaaataaaaattcataaagtagaccgtaatgaaacagatgtgtaacagtaaacagtgtggtacagaagtgctcagtgaacccacttcgtttgttgtcctttgtgtttgaactgcatggtggccagaggtgcttctgacaattttctctttgcaaacttttgttccttgatgtagcccaccacactatgaccaccctcactcatggattcactaaaactttgggtgagtcattatcttacttgttctttattctatcttttaaaaatgtatgtatacatactttgaaaaatgtatgtatagctcacattgatttcagtgttttattttagaaatgtttgggatctttatttagaagtttaggtttttaggaccagaaatatgctgtgggaatataactcctgtttatatcagttaacttatggtaaaattgggttcataatatgtcgtgtcacttaaagttgtcatttccaataacctatcgagcattaaatgagacttcccctaccttggacccctcctgtctttgtttaggctgttcttcccatctctcgtgccttcctcccacatgctcacacatggtacctttcaaatcctttcagcactttgggaagcccaggcgggcagattacctgaggtctggagtgtgagaccagcctggccaacatagcgaaaccctgtctctactaaaaatacaaaaattagccaggtgtggtggtgcacacctgtagtcccagctacttgggaggctgaggcagaagaattgcttgaaccagagaggtggaggttgcagtgagccaagatcatgccattgcactctggcctgggctacagagtgagactccatctcaaaaacaaaaacaaaacacagatccttctatccttctacgtacacgtctaaggcaagaagaaaggtgagcaagagcaggagattctgtcttgtaagaaaaggatgactgctaggcaatgcagtgcttaagaaatgggacgggaagacgaaactaggaaactgagggagacaagcagagacagccagtggtagtagacatcccatttctgagcggggtgtgtcagtgtggcgagatgcacaaccagccagcaaggtgtgtgctgggaagtacacaccttgcctgggcttggcaagcagtaaaaggcattctaatgaaatggggaggcaaatccatataataatgttataaggcttaaatgagtgatgagaaggctactcttgatgcaaatttatggaaatgaaaagaggaaaatgtactgaggtggaaagaagggataaatagttatagcaagagagagatcaaggtcaaaggggttgtaaatatggcaagatgctgaaagaaggaagataaagggttatacctagcctagaaacatgttaactgaagcttttataaaaggtagaaaatatttgacagtgtttatagactatgtacattgacttagtggagaggaagattttgaagataaaaggatagaagagatgactgatagagcaagggccaccaggaatttagatgtagtagcacttagagaaggtactgttcctgctggaagatttaggtgctgggtaggatagataaggagtgttgtaactacaaaatatgaaaaatattcctgtagtacatgataggcactgttctagatgcttgttatattaactcgttaatcttcacatcaacctttcaggtaggtttcattatcatccctatctgcaaataaaaaaagggactcagaaagcttaacttgctcatggtcacacagctagtaagcagtagagttgaaatttgataaagatgatgcctaaaaatcctaattaggacatttggcggggctcagtggctcacgcctgtaatcccagcactttgggaggctgaggtggacagattacctgaggtcgggagatcaagaccagcctgaccaacatggagaaaccccgtctctactaaaaatacaaaaattagctgggcgtcgtggcacatgcctgtagtcccagctactcgggaggctggggcaggagaatcacttaaacccgggaggcggaggttgcagtgagccgagattgtgccattgtactccagcctgggcaataagagtgaaattccgtctcaagaaaaaaaaaaggacatttggggaatactggatcaggactttatcatcttcagaattttctgtaaaaacgtgactattaaagaatgacttcttatttcttgtgaattcatttattttgcaataactaattccaggtagggtaggaatggaataggaggacttctaattctcaaatgtcaggagaggatataattttcagaacatgagtcatattctggagaggttaggccttggtaggtgcttgcctatggagtaggggttgggtgcaccagccagccaggtggtaccatgagggtactctgaccctatagcctggggttgggattcaagtgaaacaacagaaagtagggggagtgtcagaaaggaaagtaaaaaagatgctgaaaataaacttggtcaacttcacaattttgccaagacagacacatgatctccatttccttctcctatctcctgcctccttcctgctctcagaggctttaagatttaggtttctagggcgttgaggtttttgtccctgattttaatggtaagggagagtgattctccttggctgatctgatgctcagtctattgcttgctaagtaccactatgctgccttatgaatcctgcctcatctggctgctttgcctggccagggatgtttttttttcttttcttttcttttttttttaaattgaaactcagtagctgatagctttggcatctgcatgttttctggggttcaccccagggccatcatcactgaaatcatgccactctggctttacgtatactctgtgctttccaaaatacagtttctcatctgagccaccattgatgcactggcagctggaacaggtgctcttcttcccctttcacaaacaaggatgtgaagactcccttacccaaggtcacataattcattagttgcaaagcttggatttagaatttgatatcttgagtctttttcttgaggcttccatcattgctgccatgattggaagggatggcacagggcccactttaaaggggtttgcaaatgggatattaaaagggatcgagaatgtttcttaaattatggatgaaggcagccagactagggccaagatcttgggggtctccaaggtacctaatgcgtgactcaagtaatgagagttttaagttcctttcgttttttcctagtattttgttaattgactctccagtaccagatcttttaaatttccctattaagctaatattttaaaacattattatctgggcatgaaagtcttttgtattcaccagagcaagaaagaaatcataaaaacacaaataagaaactaacagtaccagttgttaacatttattaggcactcactgatattagcagccagaattgctcttcagccagtaaacccttgtacatacagctatactggttgttgatggtcagtatatatatatatatatatatatatatatatatatatatatatatatatatatatatatatatatattgtgatgggtttgttttcagccatactggttgttgtgtattttgaatatcctacttgctcacaataatcctacgagatgattattatctcaatttcctttctttaaaaaaatttcatagcgacatcttagaaaatatctccatttcctagatgaaaaaaattgaggcctagaagattaaataatttttctaaggccagtagctggtaaatgagagagtaagaattcaaacccaagttcagatgacttcagtgtttgatctcttgccactaaacaagcctgctactctgacataccccatagttaccccaaggattattaacatttccttctaggctttctataaatgactagctgtacctggagtaacataagctattctagcaaatcttaatagttgttgataaaatattttttaaaataatgtattttttttactttcttatggtaaatgtgtgtaagcacagtaagtaatctcattttccttagaaacagcccttaatgaggccagtgatgggaacttgagaaagcaacaaattactgtccaagtttgaaaaggtatcatccctttctgttctgtccctgggactttttgatggtcgttgtcaaggctagagacttagaaaacacttagcttttctagtgaaaggcgtatctgtgttggaccaaatgaggggcctttgcaatataaagacagtatctaagttacttgtaaactcattgttatatttcttaacctatgctcgtctatctttatcacagcttactgattatccacatgcattacttttacttgattattttcatgacattttatttatttatttttattttttttatttttttgagacggagtctctctctgtcgcccaggctggagtgcagtggtgcgatctcggctcactgcaagctccgtcccccgggttcatgccattctcctgcctcagcctccccagtagctgggactacaggctcccgccaccacgcccccctaatttttttttatttttagtagagacggggtttcactgtgttagccaggatggtcttgatctcctgacctcctcatccgcccgcctcagcctcccaaagtgctgggattacaggcgcgagccaccgcgcccggcagacattttattcctgtaatcatcaatatattattttaacaaggttttccaaccatcgttttcttttggggtttcatgttggtctggtctgtttagtcatccctctaatgtttcattggtcttttctttttctgggtgtactgtggaggctgttcagctatttttatcttaaaattttaaaatccttgattaaacattcagaaacactgcggctcttacattcaaccactatatttctgtgacctcttagtgtcattatttctaaattaggattctgattttaggcaataaaacatcttatatacaaatactttatatacaaacgttatatataaatttcatatacaaatatagataaatattctctaccatttattaaatgcttacttgtataccaagtattgtggcttataaacattctctctgatgctgacaacattgtacttatttccattttgtatataaggaaacaggctctgggtaggtaacttacctggtgccatttagtggaagaagcagttggaagtgaagcctggtatgtatgtatagttgaaatcattgttagaatagtggctaaatgtatgaagtactatatgccaggaagtataataagcactttaaataggtaaaatttagattttatttttatgaaaattatatgtgaacataattttaaaaattagtcattgtcttttaaaaatatgcttagtaattttttgttatatgctgtgttctataaacttatcactaatttaaataaaaagttcccttgtttaatttccttccaatatattcatatattaggaatcctgtcaatttcttctcattgaagaaattccccccaccaaagaattctgatatttgttccgaataggtcgttctgttctcttgacttgctccatagctgctgcctttggatttgctttcaccatcgtccgtgggatgcctttcttgcctttgtgttagtttcgctctaggatcctgagtgttctttgttttcaccttggttttgatggagtacatcctcctgagaaaagctagctgggaagcatagttttgagaacttgcatatctgaaaaagactttattctacccttgtacttaatttgtaagttgactggctttaaacttttttttgaaagttggaaagtatctttccccacaattttgaagtgtctaatatattctagtttccagtcatgtttttgggaaatctgaagccattctgattttttctcctttgtataaaacatacttagttcttcctgaaattattgaatcttttctccagtctgagtgttcagaaattccatgagaatatgcctaggtttgagtctattttgtccactgtgttgtgtattttgtggtgttactgaatggaaatgcatgttgttcatttctgggattgttttttgaattatttatttgattttcttttatgtattttcttctttctttctccagcttttatttttgagatgataaattggctggactagttcttattttttaaagtgtatgtttgctatttttcatctgttattttttatttgtggatatattttattttcatgtttctctggcatttacaatttctatgtaatttttaatttctaagacctcggtttttggaaaaaaattcagcatcctattttgtggatgtaatgtttctattttttattgattatcatttcttaatgatatttttattttcttagtgtactcctctcttcatagttctttcttcctaattgtttgtttttgtttgttcattctgatctccttttatgttaaatgttttcttcaaatatttgccaatattagagactttgctcatattttttgtggcccactttgaaaaaacattgaaagctctctaggtatgaatggggcttgttgatcatggtcttcattgtaagatgagttggctgattatatttaggggcagagagagggttttcttacatcagactgtttagttcttttttaataggctggttaattacccagataaaagccaatatttgaactcttaatttctgattccagagtttgtacttctgtccacccattttattaattttcagatatgtttcaatgtctatgtacattttattgtgttgtctctaagaaagttagcagttgaaatgtagattaggcattctcatttctgaagatgattcctttaatcagggattcccttctataattgtagtttttttaaaattgtgtttcagcacctagaagaatgtctggtgcacagtaggcactcagaaaataactgttaaatgaattcagatcttgcacacagcattgggctttctgaatcatatatgataggaagtagaagaaagcccaagtgtcctaagtcccattctagtgctgtagtgcacgtgtacacactcagatttgacaaaggcagttgtgcaaaccgaaataccttcagccctgaaagagaggtttcctgtgtatggaacttcttggggcaagcatatttttttttcctatttggcagttaggaggtattattgaagtggtaacaaccataagtgggcctgataggagcaagtggaaaaagactttgtggggtacagaactattctgcttaagaagtctgggggtacttgtgcatgaagactgcagccttctggatcttgatttaagcatacagtctgctgactgcttcccagagaccttcccatctgttcctttctgctgaataggtctttttaaacttagaatggagagacgtccctaagggcctctccagagccatctctttccttccctattagctttctttcctctgtttctctctgcttctacccatcagttcttcatctttggagtagggatgggggtaagagattgttgatgttgacctggtttttagaggagccaactgccaaactaaacaggctcagctattggcatggccatttgctctgtgatgttgcttttgacatctgggtccccattcttagggagggatcagtggagtagggcttccccaaaagaagcaggaagagggcaagaccacagtatttctacgatttctcttctgatgataatgagtaacgatgtttgaacttatgatactcagtctgccagccacgttaagtttttgtcagtgagtgggataaaagggagttgtactagaaaatagaataataatgaggagggtatggtgtctggaaatatttaaacaaagaagagtcactgtctaggcatggagagaaaaataatttattgttttaagctacatcatatatttagacctaaaagcatagtttgtttgtaaacctaaagtaattttaacctaatttaatatattctggtaatatcctagagtaagatacaattagaaatttaagaatttttttaaaaaatgcaatatagtaacatttccctacattttaaattaatcttttaagataattataattacatgcttattatatatacccattggaaaataaaaaaaaatcttcatgaattcaccttcaaaaggcagccactgttagtatttggcatattttcttctagcctttttctttttgtatggtttttggttttgcatagcagtcaaggcattttgcttgccttttagtgggatttttttggtcttcagttggagttgactgtggttatgttctgataatgcatgtctgtgatttattcttttcttgtcatgagtcggaataaggagtgccttagttcttggcttgaataaattctctatcctcttttaacataacacattgttcagattagaaaagtgaataatccttaaagcaaaggagtgtgatatatgtttcacaaccacttaaaaaaaatcagatctaaaaaaaaaagcacaaatggcttgggagaaatgtgcataacaaagataagacttcaaggctcttgagatgggaaatagtccttcagaagtgctaggacacattattgatgtctagtaatatttactacatgtataattatttttacatgtaacatggtggtctcaaggctgagagagaaatatcttttcatctagaagcatggaagaggggaatatagtgcaatagagtcactagtgatgccagaattagaaattatgatcttgtctgcactgctgactattagtagttgccacctcaaagacacctttcctcaatatcatcaccaataaaatggtctgcaaagcctgaaatatttaccatctaatcctttatagaaaaagtttgccaacccctgatctaagtgatcccaaaacctatcttctttcatcctcattacctttgtcctaatttaggccttcatttcttctcacttggaaaacccaagatactctaaatgtagtttttttttttttactctagttttgaacctctcaaatgtattgtgtatggaggcagtatcatttttaaaaatttggaaacaacatttttgcttgcttcaattatttggggcaccctgctgcactcaggataaagtctaagtttcttacctaacacacaaggttagaaaaccagcacacttcactgacatctaaagacccttacaattatgagagactagattttctttcacgtgacatatgctatatgaattgcaagtctcagaaaacccaatccaactctaccaggcctaagtaaaaagaggcgatctgttgcctcccatacctgagagatctacgagtagatctagtttcagggagtcttgatctgggtttctaattgagtcgcctgggctgtcgtttcttctattggcttcccttttgctcacatggagactttcatcttgagaggtctagattgctgtagcagttcctgcctcaggtttttccaggtttacatatggtgggagagagaacaattatttcccactaattcctatgcaagtagtaaggtctctctgattggactgcccaggtcatgtgatcagggataatggcatgtgctgattgacttagggccagttcccacactgtagccctagagttagaggggagatcccacctgaaccataaagactttatccctaagcgaacattgaatcgttgtgaaagtggggtgattggaggtgaactgggacaaaactaccggtatttactgagcaccccacgagcgggagccttttgacagaagcggtaccagcagcgctccgcacctgggcaggccagcagtgaatatttggggctgcatgccatggtcttgttgactgcgttctcatgtgcacatggttgtcacttggttctcggagcacgtgagagaatgttaaattcggaatggtagaactaaaaggaagttcacacattaagtttgtctcctttattttacaaaagagctacatgtagtgcagagaggacgaggggtcctaactgtaggtatctgtattctggcagtggaaacctggacatgttgcatctctgctgcaagatgtgcacaccatgccagactacaaagtacacgccatccattttgagttcaaaatagaattaggtgggtgcttctgttggccaggtggttgaagctctgtgtatacctcattcctcctgggtgctcaatagggccttgcctgggataattaaaagtaaagcagaatcgccaagtactttctccttttctttgctaacactttagtccaaggaaatcagacttagtaaagaatggatggcagtttcagacagagatcgcacagtttggggattgtgagtgccttactcagtggttcttaattctgcctgcctattataatcacctgatgctctatgaggatcaattgactcaggattgctcatggttggccaggtaagagtgattgcatacgttcttcagatgattctagtgtgtggccaagactactattgactggatttaggtcctgacttcattgacttgttcagtgactttgggtaaataacttaatctctttgagcttcaatttcttcatctgtgaaatgggaacaatcctattcacccagaaggattgttgagaggaataaatgaagtgatttatgtaaggtatacagccaacctaggtgctcaaataaataagtagtttcttttcagtggttcttaactttacagggatattgtgttagtctgctagagctgccataacaaaatatcacagactgggtggcttgaacaacagaaactgaatttctcacacttctggaggctggaagtccaagatcaaggtgtcagcaggtttggtttcttctgaaacctttctacttggcttggagatggcctttgttctgtgcttgcacactctggtgtctcttccccttcttgtaaggacatcagtcatattagattaagaccccacccttacagctttattaactttaaatagccctttaaaggccctctctccaaatatggtgacattaggggttaagccttcagcatatgaatttttaggggtcgggagaaacacaattctgttcataacaaatgtggcttctttgattctcggatgaaactaggtttcctttgaccagaagaatgcagagatacacatgcatatcagaccttgcatacatttatcggaccttaaagaaccttttagcaatagctaaagaagccttacagaaggaaacaaatatgagagacagagggatgggagaatatatataacacagaagaggcatcctattctcatttattccttcattcaacaattatgtacagcatgctgcccacgtgccagccattgtgtgaggattatgaaactggcaaggtccctgctcttaagacttacaatttttgttgggggagatagacaggaaacaaacacatatgccattaaataacagagtaccaactgccatgtagagaatcaaaacagaaagatgtagtgctctttgcccgggaagcaacttaaatgtcttcactgagatgatgatggttaggtggaggcttgagtgacaaggagtcagccatgcaaatgagggcatagggtttatggctggtgaaatgcctggtgtactctggtttattttagtatcagttggcagagccaactcctctcgcaccagctgcttcccagattcagttctgctgcctgcagggcgagacttcaggatttgctctgataggcatggctattgtggattgcatccctagcttgggatgcttttctctcatcctgtctctgaaatgtctaggtcatgtgtttgaaggggcaaggcccatcaattcaaacatctgtttctctaaatcctcactgacattaccagagttttgtcactattgtctttagcctgaattaaagcaaccatgggggtgagggggagtcagcactggtggtatggcaaatgcacaaggaatattttgcactacagtacatccttctacaatggtctgatggggccctgaagaatccaaagggaccccaaacagcagctgataggacaggaagacttctagaagctgagccctaaggagcccccgttggccctaggataaagaggaaaatccttttgtggcctgtaggctcctacagatctggagcctgccaccctctccagccttgcctagtactaccttcccacaccctctgtgccccatgcatgctgagggcttcagtgtatcaccgtccctccagctttgcacatgtgattccatccacctagctgcctctttgccccgtggattcctgcacactctcagtaaagcttttctagacccctatactaggtgggggtttcctgtctcccaaacactctcctcaccacacacaagcctgtcaatgctctgtgtgcagttttacaatttagagtacctgaaaccctgctatttgtgtgatatctgtcttctctgctagtttcttagttttcgtaggcatggaccacatctgatttactcactaattactcttcagtgtccggcaaagttcctggcaaaccgaaggtattcaggagggaaaaagagatctggaaggtaatagatggagcaggaagaagacaacctagaaaggtaaagtgccagatgccaagggagggagagcatggagtttgccagtgatcaacaatgcctaaagtagttgagttgccaggccaaaggctggcgcttcctccaaagttagtattaaggggtcattgatagaatcagcagcaggtggaagagccagattataatggattgagacctgggtgggaggtgggcattagatatagcaggtggatagggttctttagaatggaaggatggagtgcttaccagtacacatgtggctggactgcttgtttcagatgtttcagatcctgcctctgctacttggagcatgtgagttgacaaattacttcagcctccttgtctcagtcttttcatctataaaatgggaccctaatgcatctagttcctagaatttaaatattcctggcaggtgtattggctgttgtgtggaatctgagcagcgaacaaggacacatgtattttctgattcatagtcttcaggtgggcacagcttgactccaggcttctggctggggcctgctgtgtaaacaaagtgtgtgtcttattctgggatccaggtttacagagcggttgttcaacaacaatcctgggtatgctcttcctctggttatcacaagtacataagggactgaatcaaaccacttaagcatgtttaactcccctgctcacatcttgtccacttatatccattgaccaaattcacatggccaaagccaaagtcactgtatagggacagacactctgccataaggggaggggagtgaatatttatcaaacactaatgtaaaatgcttaaaatggtgcccatagaagtctgtctgtactgtaaaaaaataatgtacttctgacaatcttactgtggggaaggaggaaaagagggaggagttttaaaataattaatagtcaaatggagagattattacatagggcaagattcgagcatgttaattgactcatgggagagagccagtgggctgggtgaagaaaaaagagcaaagcagaagaactcagctgaggtttggaaacatgaacttagagtgctgctgtcttccttatggcttttgctatcagcagtagccaaggaggcaaatgcttggattgatagactttctctggtctgagctttgtgtacttgattttttttcccttctccctgatcttaaggagagacttagattataacagttggtgtttacaatgttttaatggctgtcatattgagaactgactggaagcatctttagaaataatttacaccaccataaaatgaattgctaatctttccgagtggattctttagccttttttgtttgttttttaatatatcagccaatgagatctagaccaatgagaatactggtaaaatattttagaagcattgtctgatttgaaaagctaagtaggaatataaatccttccctaaatatgcagtcacactgtctgccatttgcttgatgttttgtttcttcacttgtttcttagagcaatgtgcatgtatgtgattaagacgtccataggatgcacatccaccagtgctgggctgtaggatgcatgggtgggaacatgagggatatgggatatgtgttgatttgaaccagcagtcattatgtatcttctctgatggccccggtatctaaagggatgtaggtaatggtgttgatgaacaacgacattatttagggaatgtctaactttatggtagtgacttgaaaaagtggaaatacactgccctgagtagtgcagataaacactttaggagattaaggaatacaggtatatgttggaataggagagaaggttttaatgagacaaattgcatcacgaaggatgcttgtatatcaacacaggaatattgccagcctgtgtttattcatttgtattactgaaaccacatgggctaagtttctccctgctttaaacatttattggctttccacctgcttagtgaaaaaaaaattcagatgtcttattctaatacccaaggctccatgcactcattgtaatgggtcctgtatcatttttttctcgtagtctttcctgattttcttggcttggaggtaaacgtttcctttttcaattttgcagcctcttattattactttctccacagcttttatttccacctccccttaccactatatcatctacaacgtaactattggctagcctattttttggtcagttgcatagaagtactcaaacctttagctttcgtagttttcaaaataggggacacagagtttctataggttttttttcttttgctaacattaaaactcatgtgcacagatacatacacacttaatgtatcttatctaatttcataaaatggggttaacaccaaaaaatgcagacaagacagtagaataatcaagaacagaccttcacactgaaaacatttggccaatggaaagcttacagagctgttttttttcttcattttgctgaggaccaccgagagcttcctcacatatttatctcctctttaggaagacatttgggagccactattttagtaaactgtgagctttaccagagctgatttatctctgaatccctgttcatctctttctccctcagagataatctggggtctctaaaagcttataacaagaaaataactgtgatttgtgacatagaagcaatcagtgtgggggacaggttattcaaagatctgacagttgtctaaaataactaaataggaagtcgcttttataaaactgtctagaatgtgtatgaaagtcagaacagcagacaggttatgaaggctgtttattaaagaactacatttttagaatagtggcattatgtttatttttttgtaattctggaagtgtagatgtggttacttagatcattacaaacaattacacaactatagaaaagaaaataattttccgacgtaatttctgacctcaaattctacttttctctgttctttttaaaactaacatttacagaaaaaaacacattgactttaacattgggttctcccagtgttaaaggacactgataatttttcaaacttgcactattcaataggactttatgtgataatcgaaatatttaacaatctgcactgtccgttatgctgtacacagccacatgtggctacagaaatgtggctagtgcaactgaggaactaaattttaaattaaaaaaacataatttaaaatagtgaccactggctcctgtattggacagtgtaatttcaaaagatggaccaaggtacattcagaagtattgagctgttattagtaataccacctctgatggcatcttgtcagttttcttggtaaattcaagatatttgaaaaggaacttgttttttttaaggagtctttagcaactcgtatacttatcaatggctccattgaactttgaactacttttagcctttggaccactgcaagtttttaaagtgttaattctcaattcatgaattaagctctgtccatttccttcatcattatatctctcattttagagaatgtgatttttgattacaaaaaatatatatatgttatatgcacatatacacatgcatatatagacatttgtgaagatcaagtgcaacaagggatggagtttgttaaacttgaatgttcctttagtctgaatgttactatgaatagacagagtaagcaaacaaaattgcctgctaatattatcttgccccaccctccctgagaagagaaatgctcatgttcattaagtcaaaccagaacctctcatggcttttacatatttctgtggtttgatagatacttctgtttctgcctggaatattcttttttgtttttatttccagaacagaaccttcaagagaattttatctttttcttccctgaagcctgtgtctgacctttgtaaccttctaccttccctaacaatactaatcacctgtttctgttagtggagctgtgtgtacaagtatatgcagatgtatgtacaaatgatctagatatttgacttttgaagaaatcaatatcattaaaataatattaataacagtaaaggaagtaataattacagcagtggttactgtttgctgagcactttctatgtaccactttctatgtattgactaaacactttaaatatgctttaattattctaaaatattataaagaagttatcattattctaatcttataggtaaaacaacactaacctaaagggaagtaacttgaccaaggccatacagctagtcagtggggacagccagatttgactccaaagcccattatttacctactaaacaataattaaaatgcagaggaaaaaaaaatcttattccccagagtaacatgggaactatgtggtatcagtctgaatttcatttcatttcccatttgccattttttttcctctatttgcttttcttttttttggcatctcggctcaccacaacctctgcctcccaggttcaagtgattctcctgcctcagcctcccaagtagctcatattacaggcatgcaccaccatgcccagctaattttgtatttttagtagagacagggtttctccatgttggtcaggctggtctcgaactcccgacctcaggtgatccacccaccttggcctcccaaagtgctgtgattataggcatgagccactgcacccagccttctatttgccatttttatggtggccttaaacatgttgcttagcatctcttagtcttcccctttttttaataggtatcaccaccttcatgttagaggatgaaaagtcctttgaatatgttaattctatactttttccttcttccctcccaaaatacccaactgtcatatgtaaagacttcctaaatgattagggtcaccttttttttcattagcttggtttcacagagaatgcagtcagcttgtcagtggaaactatgttatgaggtggagatatttgcttttatttcttatttttaacctcatttcccaatttgctcccaggtttttttttatgtatttgaaaagctgttcttttttccttcttgtcttcctactgaattatactttagtttgttttttccaggtaggttgcactttttatgtctatactgtatttatcctttaaaagtgcatggtactattttgtttatttaactgttattaaaattgttagcatgtaatatttgtctactgtgatgtaggagggcaatgggtaaaagtggaggatttatgttcattgaacacatggtaggtgtcaagaattttatatgtgttatttctctttatcaacacaataataatgtgagtgtaaaaaatagggtaatattagtattgccattttacagaaaagagatgatataacttgcccatgcttgaaaatatattgtaagaaaatggtagagcttggatttcaactaatgtgtgttggccgagaatagagttaggaatgaaaacatgtaaatcaaaagtcatttataaacgctttgaaaaataaaatatatctagtgcttgtatttaattctgttttgttgtatttttgagattaatttatataccataaaagtacatattttaagtgttaagttcgatgagttttgatgcttgtatcatgtaaccaaaagcaaggtggagaacatttctgttctccaagtgccctctaccctttccaattatcctttgtttcctccattctgctcttgagcctatccacctgagctttttattttgtttattatgtatttcagttataacatttccatttggttattcttcatgtcttatatttctctgcagagactttagttcttggaaaagcttattttttccatttgtgtcaagtgtaattgcttagtgaagcatttttagtatagctgctttaaaatttttctcagatagttctgatgtctctgtcatctggatgttggtgtctatggattgtcttttgtctttcagtttggtatcttcctggttatgagtgattttctattgaaacctggatatttacatgttgtgttatgagactctagattttatttaaaccttttatttcagctagctttttaaaatgccagtctggccagggaaaagaggagataccacttacttactgccaggtagagttataaatccaggttccccgctcaatctcagttgatacctgaaaggtaggacttcttccttatggctgggtaatagtgaaagtcctgtctaccagacttcctctgacacaatcgcaggaaggaaggctcacctctcataaactggtagaggtgaaaatccagccttgccatatcatctcagctgacattttggagatgaggaggtaccctctttaccaattgacagagatggaaacctggactccctacttggccttctatggcattctcctgggagtattggggtacctaagtgcagcctggtgagggtgtgagtctaggctttacaatcagcctttactgatgtggtggttgggtcacatttcttttctgtaatgtttgagtaaagcagttattatctacatgtttcctaccttgctaggctgtctctttcctggtcctttggttacagagagcaagctcttgtatattattttttttctgtgcccatagctcttcccaagttgcaggtttcttagttctaagtctgggatatacgaggcaaaaggaagctgagagaactcaccaccagattattcaaggtccttcaaggtctttagattgtcttccttctctttaccattcagttgtcttatgtttgtctcatatataatgtccatcatttttaactttactaagtgggatgaatggagaaaagtatgtctatttcttcttccctgaaggatgcaagaggaactactttatttaaaaaaataaagagtagatgatatgtagtaaaggaaagtaatatttcataaaaacgtggttcaattcatatacataaagatgattggtcatggattcacaatgtgaaatctctttctgtagtatcatagttaaaaatatttttaaagtcaccagtgtagaccacttatcaatctctcaaagtgatacctgaatcccttgtctaaagcatcatagaacttctgcatgtgtctgcccttgtattctcctcatgaatgagaagagttaatattcatgccttggacatcttctaaagtctgtccccactttactgattctgcaatacctaagttaagcattattttaatttccattgttttaggttgtctatgtatcaagtgtaggacaagtgaatatttgatgtggtgattaaacttaagtagtctttggaaaactagattccattatagcgaactgtttttacaaagatgaaattgtttctgtagacaagtaaaccagagtgagtgagcatcgtggggcccagagaagaccatgtccttacactgctgcatgtggtttgaacgtctggctgtgctgaacagtcatgtaggtccagcttgggcagccacatcatcattgtcaggctactgtgggcagatttgtgaggacaatagcacgagttttgtgggttcagtctttcagtttccatttagtttcttcccctgtctttctcattgatgtaataacttctttttttccagtctcttcttgcatggaataggggagccatctattattggccacttagacttgctgggggtggacatgttcagcttttaatgctgctgaattacccttctggacatttatattttacccctgtttttgatagtgggaaaaagacctctatagaaattttaagcttcagcaagtatatgtaatatcacatttagctgaccaaggagaaatttggaaatcatattctgtctcctcattgcctgacccaagtgataaaattcagcataatttagctcatttaaattagctgggagtggggaagtacagaataagtcagaggctagtcctgcaaagacccataagttcttccttgatgttgctagagtaaaggaggctggggttatcaggtcccagtgcccttcaggttatggttatactctaccctagagcaagggccagcaaactttttctgcaaagagccagccagtaaatatttcagtctttgcaggccacgtggtctgtgtcacagttactcactgctgccattgtagcacaaaagcagacatgaacactatatagataaatgagcatgcctcatttattattttccagtaacactttatggacattgaactttgaatttcatgtaattcccatgtgtcataaaatgtttttttccaatcactttaaaatgtaaaaactattttggggtcacaaaccacatgaaaacaaacagcaggatggatttggtcaatgggccatagtttgctgacccctgtcctagaagatatctgctgggcagtttcctttgcccaaggagatgttgtgctccctttctattagctaaaccaagcctgtgttcctgagacatactttctggtacagttgttgtatttttatgtcaacacattaatgaccagacacacaggaacacattcccatccccattcattgatgcaaaagttttcatgaatgatctgggcacttttctgggtaccttaggaccccagctaagcaagaaagtttcatcctcaggtcttcagagtgtcatctggattgattacctctgatgtcagagtttactgataataacatgtattcctaaggtatattcctaaggtatatctgttattcatactatacttattcagctttctaagtcataataggagctgtgaaacccagaccagaacattttactaggatttctgttttctcttttaaaaagaagggctaaacaatcctatgttattggttaaaatggaaatgtgtcattttgcaggggttcatctgaaagttgtagaagacacgactaaccatggcttaataagcagagaattacttttctcacagactctcaagtccagaggagaataatgaagaacaaagttcgagtagcccaatgatgtcagagccaatgtgactattattctcttgactttttttcatctttgtagccctgtggtcacagcatgtactgtagcagttctagatatcacatatgcctttaaggcagagacaaaggggaagagtgatgttaagatctttcctcttttgtcagttccagaactgtttgtttcccatcaaacttctgcttatgtgccctagggaggaatctgtcatcaacctcacttgtagctgcaagggaagctgtgaaatttgctattggcgttgtagccatacttcagtaggtggcaaaaatgagagtgttgagaatgtgtagcccatcagaagtgtctgctacaaagagttacagactttttgtgatgttcacattacttcttgagggtagtctctgctgaattcgaatccagaatacaataaatgaagcacctataataattaatataatgaattaaacatattggagagtgttatgtgtatattatattagggaagtgttaaagaaggaccatctccttcaggaactttagctagaagcaagacataaacatgaaatttgaaataacctatctcaattctaataactaatggtggggattggagtatatttgtttttaaggtcactgattcatttagcaacatttattgagggttgagtatgtacaactgtttaggctttgcaggtgcaaagatgaataagatagtctctgctttgcagatggcagtcaaataaatcagtagtttcaggatagctttatggttttgtgatttaacatttttggtgaattacacaattagattggaagcaacttttatttgcttttttgaaaaatatatgttacgcatcagtaccgaatggcagtgagtaggattcaatcagtatctttccatcatatctatgctcagtctataaacaatgattgagcacctactgtaaggtagttatgtggctacacactacatttgtaaagctcagcaagaagtagtcacttcttctgggggctcctagtcatagatttagcagacctgtcaataaatatttgcaacacatggtacatacacacacatacagatcatataagaaaaagaggtggctgggcaatgtagctgatgcttgtgttcccaggaatttgggaggtcgaggtgggcaggtcgcttgagcccaggagtctaagaccagcctgggcaacatggcagaaccctgcctctacaaataatacaaaaattagctgggtgtggtggtgcacacctgtagtcacagctacttgggtggctgaggtggaaggaacacttgagcctgcgaggttgagactgcagtgagccatgatcacaccactgcactccggcctgggcaacagagcaaaacactgtctcaaaaaaaaaaaaaaaagaaagaaaaagaggagaagtgtttttattgcttaagaggatatactgggtgcaagactagttaaagctttacagtagaaaaaagagaaaaattaatatttcctgaagcagttatctatgcaaataagggaaaggaagagcatatgatgtaaaaggtcagttctgtcaaggtagagaagcacaacacatttcagggcactgcttgcagtttctatgtgggggttccttggttggggagccagctcattctgaggggcaactgggagtgttttcacagtgtctctattcaaggcaaaactcagaatagaggaacattaaaatttaataagtctccatcccttgtttcatgacagagagtggtgtgggtggagattggaagaactggaagttgggtggcttcctggagactaagatgcacttgttcttgggaatgacagcagatgccaatgcacccctcaactcttctagcatcactgtgagcagagaaaacaaggcctggcacttcattccaggtagcctgttactgtcacctaaatctcatgagaatggcatccctcagccactaagccttggagagcccaggctcatttccagcaatcagcaatccaagccctgcttctgctgattaggacaagacctgttttggagaacatttcctttccaggaaaattctgaagtaacctcatacttttgagctataatttttaccattttattaaaaaataaaataacattctagatgaaaatcacgatgatattattcataaataaactctcaaacctttgaataaaaatatctttggaacctctctttccatttatggaggtattagggaagttaaaatgagagggagtggggtttttaagtttttatttttttattgtgacaaaatatacattaaattcatcattttaatcatttttaattatatggttcagtggcattaggcacattcacattattgtataaccatcatcaccatccatctccagagagttttcatcatcccaaagtgaaacactatacccataacttaccaataacttcccattttctctcccacagcccatgtgtagccattgttctattttctttctctgtagatttgattaactcatataagtgaatcgtccaatagttgtccatttttgtctggcatatttcactttagcataatgtcttcaaggttcatgcatgttgtagtatggatgagaatgccattccttttataggcgcaaaatatttcattatatgtatcacattgtgtttatccattcatgcatccacaggcatttggtttatgcctgtttgactgttatgaataatgctgctatgtacatgagcatacaaatatcttgagttcctgctttcagtttgtgtgtgtgtgtttgtgtgtgtgtgtgtgtgtgtgtgtgtgtgtgtatacctacaagttgaattgttggattaaatgacaattctgtgtttaattttttgaggaaccaccatactgtttcccacagggggtgtatcacttgacattcccaccagcaatgcacctggttttcaattttctggggaagtaggtttttacacatgaaaaaaacatggtgccttcaaaagggcatttcaaaacaatgctaaaatatgtgcatttgcagtgaaacatttctctcttaaatttttttaagagcaatgtttgtgaaattcattttggtttttaactcttcattttgaagaattcaatattaatgacattcaaattaagtaaaagtgacagcagcagcacttcccataaagaccacaagctgcctgcggtgtcagttcaatgactaggaatccgtcaggcacaggagtggtggtgaagattagggaaacgagaagagggtctcgaagccgaccagtgagctgccaagcccattaaattaagtaaataactttagggaaaacaagaaagggcagtgatgaacacaaaaaagagaaatcaaaaggggacacctttgacacaagcaaagagatggaggtcatgcattgtaagaggccattggagagttgtttgatttgtaaatattagggacatgaaatttcagggaaaacaaagcaaagtctatcaaaaatggttttaaataaataattctaagtacaaaaacctaaatcaactactggggagtttgcagtggaggaaggaacagctatggaggattaaaatatttgtgtgaaaaataagcctacgtgtgtggaaagtcaaaaaactgtattctgcctcctgtttatagataccttacattttgaatgccaagtatttactagcagagaaaagctttcttctgatttaaggcatgattgcgtaaaggaagggaattgctggttcattctgcagctgaacaagtgtttccttaatgtctcttatgtgccaggtcctggactcaggaatggaagtcatggagatgaaaaacagatggtacctgccttccaggagcttacagttgtgctgggcaaggcagacagatcaattacatggacattcttagtactgtgaggaaaatgaagcaccaggggactgtgcatgagggagcatagggaatggtttcttgctgtggtagccagagactcctaaaaggctttctgaagaagaggtctgagctgacatgaggtgaataggacttagcctcccaaagagcaggagataggattaggttggagtaggaccagcatttctaggtggtgggaccaccgtgatcagaggtgaaggaagtataagagtcaaatttggtggggaggtgataggggaagagaataggaggtctaccagcagttcagtggtattcctaggtcatgaatttcaaggtaggaagcagcagaggataaagctagacagaaagatcaaagctacacatttttcttttcttcattaatgtctgaatccatcccatgccaatcccccatctccctacacaagcacaccttttaaaaataatcacaactttgatgtatttaattgaatattcattgtaagtaggccagtctttggagatggagaagctgattgataataacagtaattagcttcaagctctcagaggctttggctactaagttctctttccagcactgcctaaagtgggcattgttgttggttccccagcatccattctgctacagccctgttgagtagcagcagtgtggtttggggaattgacctgagctggtcagttggtttaagggtaatcctatttccactgccagcatgttagttcagtaataggcatgtaattcactcctggccaatgagaaaagagaataaaatttgaaggaggtttgggagaaaaagccatagtcaaccaagccctttctgcttcaagatgaaaactaaagcttgtagtctagatgctacaaagggacccaggttcaggataaagtcggtgctatggataatagaatggagaaagaaaaaaaaaaaagcacagtgcttgatgaaactaccgagatgcaaatcagctaattctgaacttgtgccatcactggacttcttgttctgtcagctaataattttccataccatttaatctagtttggatttttccatgtgtaatatgaaatcgtgtatactaaatgggccatgatttttgtgacttttctgtacacaccagtatagtatgcccttttgtgaacctaacccatttgagcctcattttccttatctgtgaaatgaacatagttatgtctcagagtttttcatgaagatcatttgagattcagaacaaagcccaaaagggaggtatgaactaatacatgttaagtgcccagagtgtaccactaaataggaagcttagagactaggagaagagaaattcataaataatgtccacataaagtggtagaaataagatcacgtgcatttggacctttgtgcaatcagtttgtttttttaaagaaatatcattgaatatttgagcagtatgttaggtgtagagctgttggatttgctgatagatgaaaggaaagtgatggatcatagagtgatgttaaggatgtctcatcagtttctgtgtaacttgcgaagactgaaacaggcaaattgtttctgctgcagttttacttgtctgacattcataagaaaggtgtgtctaggctgcagttaatatttgggagtcaccagaatgttgattgggaacataggaatagatgatatctattaaggagggagtggatagtgggaggaaaacacctcacttcttttgggaagcctgcctcatccctcaggtctaaagtactcatcagaatcctggcaaagatgaggcaaagaggaaactatggcctaaatggagtgccgaatagagagttggactttttgagtcacggaagctggctggaggggaagaatgctgagaaaggggaaagcctaaagatgttgggtaaaagattattgatgaagtggagacctggggaagatgggggtattaagtatctggccttaacttctctgtgaataaaggaaaggggatgaggataggagtttacctgaatttgaagagttggggtaacagggaaatgaaataatttactaccagagaagtcaaaacacacatacctgccatctgcacacagacatacatggtggtttatgtagtggaatgcatggatcttacaacattcattgctatttatttgataatacagggtacataggggggctcagtaagcgtttgttagatgaataaatatccccagaaaatcagctttaggttttatttgtggaatatctatgttacagggcatggagagagtaagatgcaaaaaactggaagccactgggcttgatgcccttgagccctccactctggcttttttttctttgccatgtagaagtgacagttctgtttgaaaatcaccagtccttttgtttgcctcctttattacattgtgagttctttgaaggtaacatctgtcatatgtaaatccatgtttccaggatctaacccagggatggcacatagtaagtgcttaagaaatattgcttagatgaatgcaagagagtggacttgagtggatgcctaaataataaagaaggtccagaagaagagagggtgagcacttttcagatggaggtagagatacaaactaaactgcagggttgaaataattgcatgattgcgtgtgtgggaagcagtaacaacgttgcctgatttggtattctcatctgtaacatttggatttgtaagttgctgaaagtcaaacaacttggaattgagggcttctggatttgtacctaaatcttgctgatttccaagctcaaggtttcccactataccgtgctccctcctcaccatattatttatcgtagtaatcacaccacctctcgactcatagatgcctcgtttttttcctacttaggcttgatgaatattttctgtcatggacaccttctttatgtggtttgttttctgagttctatttgttgctttttcctagctctccactgtggtttgaatccacggggtattgatcaccctgcccatgctgaaggtattaaactgcaaattgaaggtgaaggtgtggaatctcaatccattaaaaataaaaatttccagaaggtgcctgaccagaaaggaactcccaagcgactgcaggcagaagctgagacggctaaggtgcgtaatattccagttaattacggagatttgaaagctgcagcctttatatgttgtagtccagctacagagaagagctgatagtgctttcactaattaccattgtatctgtggtcaaatgagcactgtatcttgcggataaataattataaatgaaaatattaactgtattccctttggaataaaattgaaacacgtttgtggccagtctcatagtgtgaggctctgaggttatagagaagaatgccctggacttgaagctaaaagattcacctgccaggctcagacttaccactctatggtgttgggaaagtcatgtgactttctgagttgcagattcttcatctacacaagggaatcataaaatgacttctctcatcaggttgagcagatcaaacgattgtatgcttgtggaagcattttataaaagccccagtactgcatgagtatgagaggcttgtgcttacaggtattgttaattagtaatagctgatattttattaaatatgcatgtatctcccaggtactgtttgaaggactcttgatctattgacttattgtgtccctgtaacaatcttgtgaggtagacaatagtaaatagaaccctaagtagtgaaagagaaaattattttattctgctgtagtatgcttagttcttttcagtctttaacctaaacataggtaacagagaactgacaaaataggcattggtgaagaagtacagaaacttggattctgtggggtaggtaattttttagtaaggacagcctcttctaaaggctccctacaatgggactggcactatctggatatttgtctgaaatcagtgcagatgttcatgttgggggcacagtgttgttgaagatactcatattagttttcctcttggacactgaggaaattaatcttcatatagttttgtttctccctttgtgtattccctgcaagacaatttcctttcaaatgttggttgagcaaatgaatgtatgcatgccttggaaagcaaatgttgtaagcacctaagaaaaatcttaaggaaaaaggtcaccttactgttgtacaataaccacctcccttctcctccaaataatgtcttccaaaatcagatgtgaattttttgctttatgtacagtttggaataattactgttattgcttctcttctttagtgtggataattaaaaattgttgacattaagtatgtgtgtgtggtagggaatggggaatgattaccaagatatatattgcaggcattttacgctagacattttagctaagagaaatggcaactcataggatatttactggctgatgatcaatgaagtttggtttgtgaacaacattggaaatgagtgaaccctgttaagaaagctaaacctgatcaatacatgggcatcttgaaagagccaggaaaaaacgccttaagggtcctctttaggaagataaacagactttctatgagtgagatattttccaaaggatgcctaaaatattaaaaattagagtagagagaaaagttaactattgatatttgtctgatttaaattcaactttaaacatttctagtgtgtatctcctatatttgtaaagatattggtaatatacaaaatttgactcaaatctgatatgattttatttctgattatcttgaatatgtgaattgtgaatcctgaaattttgtgtctttgcctctgaagcattttatagttcctttgctgaaaacatacttcaatgagtgtggatgtgtataatgtgcctttcttctggaacaaactaatattggaaaccagattcatttgagtttatgcaaatcatctacagtgaacacccatccccaacaaatgaggttgaaaggagattctgggtttttcacactgccatcatatttaggggtgaacagactagaggctttagtaaagaaagcttagacaaagaatttgtccagttgtttaaatggaggacgaggaaacaacagtggctgctgggggaacagttaaaattactacagtgtgattactgtggatgccagcagcatgactgaccctgaagcttttgtaccttagacaacatgaacttgttttgtgcaggtacaaacacatttacattttcccttccattgcatttagagggctggtagagttgtaagccgtcttctcttttcttgggtgtataattgaatctccggtaaattggcctactttaaacctaccttacaaaacctgtggctagaaatgcatacctctaaagccattcagtaatgtaaattggtacagcttttctggatgacaagcttgataatagttatcaaaattttaaatgtgtgccattagggggccaataattccctctgtaggaacttacctaaggaaataatcattcatatgtgcaaagatggctacaggagaacacattgaaaatagcccgaatgttcattcacaggacactggctaaagaaactgtgtattaatgcaatgggatataatttttcctttatgaggatgtagaagacctgtatgtatttatgtgggaaaatgtatgtgataatattttaaagtagaaagggaacgagaagggcaggttatgacatagtagatattgtatgtttccgtttatgtaaaaatgtctgtctctgtataagagcatcactgagtctaggagggttttccacaatttgagcagcagattctatctgaagttaaaattacggagaaaacttttactttctgtactgctttgcttgaattttaaataagatatgtattcttttaagtgtatttattttaaagcccttttcagattgtcccattaactttagtagctcaaccatgactttttctgtttgttgggttagtattacgcttttagggtgctgaatttcctcacatggcttctaattcttgctggtggtttatttgtcagagaagtgagttatcgtggggtcttttggccacgtgtgccttgaattgtagagccttctggtaaggtgcttttgtatctgccttcacctgaactctgggatgcgagagctctgaccaggtattacactaatgtttcgatttgacattctctctgtttgcttctgactgattatgcaaatcaagttccttcatatgcagacttctcactgggaacctggttccagctccttagtgtgcctttgggccctgccactttgagccctgccatgttggtctttgaaaccaatccctcagcacaccacctgttccagaggagcttaatgagcttatctttaacaggcaatgctagagtctgtgtatatatgtggattgggggaggattgtagcatgtgcttaatctaccctgttgacactgaaatttgtattgctttcataattttaaaatgtgtgtgtgtatctgtattcattttgggcagaataatactctatcttagaaagtgacattttgggacccttagccccaattcctcaaaacactcagaacccttattccagaagaaaaaggttgtctggccacaagtagcctccagctcttacagaccaaagagaaaccagtagagtacccagatcacctgtaagtcttattgggaagcatacagtctagatggaaataaaaaaatgaatccagttgaaatgtggatccacaaaaaatacttaccaacataagtcctaaattcttgtgagtacttggaaactcagagagaatatgcatgccatgccacgccacagctatagttaccagtttaagagtaaaaaactatgtttacatagctttataggagggtacaagcaagaaatacagtggcaaagcattttcattgcattgggaggtccagaagttatccaagtacacagcttcttttgacccatcacccacacagctgccaagttgagagtccagatgaggatgagtctctttgatacaaagaaggcacagcctctttttttcaccattcatttatatccttctagtcttgtagactcaagacaaagccacagctcctaaagaccaggagtggttccacatagcagtttccaaaaaaccagccctatgggagactgaagtccttctcagacaggccagccctgagattccttaaccctttactcacagagcagtcagaacaagacttgcaagggagggtactctagcacaggaagaacttgacctatgctgcgaagtatggataaattccaatatgtagccctaagaatggagggtgcctttagccgtgaagtctaagcactttgagccaaggtatggcagcagaaatgcccaggtgtgttcaacatcagtctcttcaagtaagagtttgtgtggcagaaatcgagtctggaacaataggctggggccaaactgtgtgatggaatttgaatgctggagtgagtagcatggatttacttttcacctccattgttcaatacaatagccactagcacatgtggatattcagatttatttaaattgaataaaatgcaaaaatgtatttctttggtcatgctagccacatttcaagtgttcattatcccatgtttccaggagctgctgttttggacaatgtggacatagaacatgatcattatggcagaaagtcctattagacagtgctgctgtaatctgtgggaaaccattgaagttctctgggtataggaataagatgaaaaatggaattgtgttgatgttctgtctgatcctcatccttggacctgagtggacaaggacttcagtcatttaaaaaaaaaaagtcgaaatactcaggagtttcttttgaaattgatgttcccaaatgctctgatgattggaatttgtatttctatggcaattctggctgtggaataagatcagcccatcagtatcctatctgtttcctatcttggaattctagaatgtgtcctcacaagtggcctaaacatgacattgggaattcttgacttctagacttgattttctaggtgtttatgaggaaacttcaccttgctgtgtttttatgcctgtcaaataagggtttcataaggttgataatcctttgttttttcctgccacaatgctaattcctggagtcagagctttgagcgttccttatatttgcatgcctcccctgtacctttcctttataaaaatgtatccccattttacagctgagaaacccaaggatgtaaaatgactcactaaaacttagtttctggctaataatctggaggaagatgtaactctctatgtctaatggctctaaattcaaggttttttatgctcctaacatgaaatatacaaatgatctatttatttgaaaagaaaatatggtctgttacactgagaatctggccaactaggcaaaagaagaggttaaaatgctgcatatattaattactcctcagggagaaaacagcaaatcttgattgctgtattatataagggagaagcaatgccaacatctaaaacagtgaataattgcttgcagttggctttgggatgcattatgtgaatctttggcagcagatagccttttctcattaggctaatattagatttagtttgtatttctttggcacagagttaaaggagctggcctggaacttggtgctggaggcaggaggaggagaaagctgggtgctttggataagccacaggcagataaatgagagttgactgcagggcaacttgtggacatttgtgacagtaagcaggaaccattaatctgggattaaaacagagcaaaaagaacttagacttaggttaaaagatgaagggttgactgtacttaaccttgatcaaattacattgcttagctgcctttgagaaggtctgttgcaatttagggatagaatgatctaattcttggctatctgtatttgttggctcaaggagcaaaaatgtctccaaacaaagctgccaacccaatataatgtcacccatgataggaaaggacacaatgcatatgaaacataatgaggatgtacttcttaagaattctcataagggtcagaacaagagacaagcaaatatgacttcatgctatgtgagttccaggaccccagtacatgtatattgagttcttggacagggctcaaacgaaactacagtaaacttatatccgaagaggtaagcttttattactaacatgttaagctctgaaaagtatgacaattaatatgatatatttaagccataggttcattgtataatcaagaaaaaagaaaacctagagagcatttgaccatctaatttattttacaagttagggagatgagactcagatgagactgaatgacttcacaaagatcttgaggctagcagtgacacagtctacctaaaacacagtttatctaacacatgaacagtgcttttcactcttttatgctgacagatctataggaaataacaagtgcttggagccacttagttaatagtatttgtctagtggacgaagagtacaggatatgccatttgacaatgtaaaaggagggcggtgttcaggcgagtgtatcagagcccactaaattcatttgagtttatccacccaaactactaaattactaaagtgattctctttggagattattggtacttgccatcccttctgcctataatgttctccccttgatcattgttcagctagttccttgtcatttaggtcctagctcaaatgtgcttctccaagaggtctttcctgaccaccctaactaaatgaatccctagtcacattctctgacatcacttggtttgatgttctgcatataactttttctggtctgaaatcatcttgtttgttttctgtctctccacagaatttaaatcatttgaaagcgatgatctagtctgtcttgttcactgctgcaatatcaatgcctgctactgtgtccagcacataataaaaagatgaaatttttgatgaatgaataagtcagttcatataatacagaagtcccttgcctctgggtttatgtctcttgcctcatagttatttggttatctttagctcctccacaagtgagcagaggatgtcttactgagttctataatggttgaatggttgatgatatcaagggaatgcttttctggattggtacaagtggcatattagccacacaatggacaagggatacttccaaagccattccattacccttcactcttcaaaagttcactctaggttgtcactgagaccaagaaaattcctgattacagtctgtggcagtcattctaaactgcacttagattcattgtgaaagacagtatggtgattcctcaaagaccaaaaaacaaataccatttgacccactgtgttagtctgttctcacattgctataagaaaatacccaagactgggtagtttataaagaaaagaggtttaggctgggcgcagtggcttatgcctgtaatcccagcactttgggaggccgagatgggtagatcacttgaggtcaggagttcgagaccagcatggccaacatggtgaaaccctgtctctactaaaaatacaaaaaattagcctggcatggtggcaggtgactgtagtcccagctactcaggaagctgaggcaggagaatcgcttgaacccaggaggtggaggttgcagtgagccaggaacgcaccattgcactccagactgggcaacaatagtgaaactccccctcaaaaagaaaagaaaagaggcttaattgactgacatttctgcttggctgcaaccatggtgaaggtacctcttcacagggcagcaggagagagaatgaatgccagaaggggaaatgccagctgcttataaaaccatcagatcttgtgagaactgactcactatcacgagaagagcatgggggaagcagcccccatgattcaattacctcccaccaggttcctcccacaacacgtggggattatggggattacaattcaagatgagattttgggtggggaaacagccaaaccatatcacctggtgtattagtcccttttcatgctgcgataaagacatacctgagactgcacaatttacaaaagaaagaggtttaattgtgagacttccctagccacgtggaagtgtaagtccaatcatggtggaaggcaaagaggagcaaggcatgtcttacatgtttggcagcaggcaaagagagcttgtacaggggaactcctttttttaaataccatcaggtctcgtgagacttattctctgtcatgagaacagcatgggaaagatttgcccccatgattcagttacctcccactatgtccctcctgcaacacatgggaattgaagatgagatttgggtgaggacacagccaaaccatatcatcctgcccctggcccctcccaaatctcatgtcctcacatttcaaaaccaatcatgccttcccaacagttccacatagtcttaactcattctagcattaactcaaaagtccacagtccaaagtctcattacagacaaggcaagtctcttccacctatggagtctgtaaaatcaaaagcaggttagttacttcctacagggggacaggcattgggtaaatacagccattccaaatgggagaaattggccaaaacaaagaagctacaggccccaagcaagtcagaaatccagcaggacagtcaaatcttaaagttccaaatgatctcctttgactccatatctcacatccaggtcacgctgatgcaagaggtgggttcccatggtcttgggcagctccacccctgtgggtttgcatgtacagcctccctcctggctgctttcatggactggcattgagtgcctgtggcttttccaggcccatggtgcaagctatcagtggatctaccattctgggatcttgaggatggtggccgtcttctcatagttctgctaggcagtactccagtagggactctgtgctggggctctgaccccacatttcccttcctcactgtcctagcagaggttctccatgaggaccctgcccctacagcaaacttctgcctgaacatccaggcatttccatacatcttctggaatctaggttctcagaccccaattcttgactcctgtgtactggcaggctctaaaccaaatggaagctgccatggcttgaggctttcaccctctgaagcgacggcccaagctctgtgttggctcctttcagctatggctagagcagctgggcaccaagtccctaagctgcacacagcatgggcaccctgggcccggcccacaaaaccactttttatacagcctactccaggcctgtgatgggaggggctgctgtgaagctctctgacatgccctggaggcattttccttggagatgaaaatttccttcctcgttagttatgcaaatttctgcaaatttctgcagccagcttgaatttctccccagaaaatgggattttcatttctatcgcattgtcaagctgcaaattttttgatggccttattgatcactgtcagcatttttgtcaaagctgttcaacaagtctctagggagttgcaaactttcccacattttcctgccttcttctgagccctccaacctgttccagcctctgcctgttacccagttctaaagtcacttctacatttctgggtatcttttcagtagcgccccactcctagtaccaatttattgtattagtccactcctagtaccaatttattgtatttatacaatacagtttattgtattattgtatgctgctgattaagacatacctgagactgtgcaatttataaaagaaagaggcttaatgggacttacacttccacgtggctggaagtggaagcctcacaataatggcggaaggtaaggaggaacaagtcatgtcttacatgaatggcagcaggcaaagagagcttgtgcaggggaactcctctttttgaaaccaacagatctcgtgagacttattcactgtcacaagaacagcatgggaaagacttgcctgcatgattcaattacctcccactgggtccctcccacaatatgtgggaattcaggatgagatttgggtggggacacagccaaaccatatgacccgggaatctcataactgggtataatatacccagaggaatataaatcattctattataaagatacacgtatgttcattgcagcactattcacgatagcaaggatatggaattaaactaaattcccatcaatggtagactggataaagaaaatgtggtatatatccccatggaatactatgcagccgtataaaagaatgagatcatgtcatttgcagggacaaggatggagctggaggccaatatccttagtaaattaacacaggaacagaaaaccaaatacaacatgttctcacttataagtgggagctaaatcatgagaacacatggatatatagaagggaacaacacatacgggaccctgtgagagtatggaggatgggagggggtagaggattgggaaagatatctaatgggtactaagcttaatacctgggtgataaaataatctgtacaataagccccctgacacaagtttacctatataacaaacctgtacatgtacccctgaacttaaaagttaaagtctctgattgcctgaataaggccctatgacttctgctaccctctagcgttggccaagatttcagatggtgtggctctttcaccctcctctgcaagctctattcagggtccctggtgtaagcatcagctggctcccgtgatttctgccccatctccctgatctggcccaaacttgaaggaaatggaaaacagcttcttctctttctctttaagtgattaggaactcctcacttaaactgaaaaattggatcaccaggtgccaagtaaaacctgaaatattatttccaaggctgtatggattagaaatcgttttcaaatgttgatttcacacatacccttagatatatgctgtattagtcagcctcagctgctgtaacaaattactggagacttggtagcttaaacaagagacatttatttctcacagttttgaaggctgggaaatccaagatcaaggtgccagctgagtcagttccaatgaggatgctctttctgtcttgcagagaccaccttttcactgtgttctcatatggcagagagagtgagctaaggtgtctgtttctcctctgtgtggatgccattctcatcatggggccctccaccctcattgacatcatctaaacccgtaattacctctcaaaggccctactttcaaacaacaccttattgggggttagggcttcaacctatcagttttaggaggcacaaacattttgtctgacttatacagattaagtatcctgtatccgaaatgcctgggaccagacatgttttggatttgggattttttttagattttggaatatttgcatattccaagttcagtatctcatccaaatgagatatcttggagatgggatccaagtctaagcatgaaattcatttatgtttcatatacatcctatatatatagcctgaaggcaattttatacaatattttaaataattttgtgcatgaaacaaatttttggctgtgttttgactggcctataatatgaggtcaagagtagaattttctacttatggcatgatgtcattactcaaagttttgggttttggagcatttcgattttggatttttagattaaggttgttcaacctgcaccaaatttgcattttggccaaatgccaaatggctgagtgttaaatcactattggctgaagttgaatatcaccatcataaaacaaatatcttagtatacaagaataaatctgaactattaataagaatacctatttactacaacttaattaaaattataccaagcagaattttttaaaattggcattacagagcagtggtaataatttctcagctgtcagctcctgtggttgttctattgcgtatttatgatactgaaaatatgctttttcaactgaggtcagtgaaggagcaaaatacgcttttatcaagctctgctattactgtagtagtgttaatggtgatattccccccaagtcaataagctttcctcctctccaataataactgactaaagtcaataactcctggacttgccatcttgctgatggtcatgatgaagtttcattgaaacagtcccataaattaaagctttggattgtacaaggtgatttttttaaattctcaaaatcaggctcaattttgtttttctcacttgagggttttcttcttaagcaatgttttcacaatattcattataaaacatgaccctcaattcagcaaccagaatgatcttgttaatgtgtgagtcagatcatgtccctcttctgctcaaaatcctctaatcacatcctgtttttctcaaattaaagccaaagtccttagtgccctaccagatcctgcatgatctgtgccttggcaagtccctcctgtcatctgctactaggcttttctatgctcattgctgctcctagttcaaaccaggtaccttcccacctccaagcctttatactggctgttacctctgccttgaatcttctttccttgggatgcacaaggtgcaccccttcatttccttcaaatctttgctctagtatcacctccccagtgaggctgaaatggtcagttctattaaaatagtgtcctctcttccaaggcccctgatccctgattctgtcttgtaatttctttaccccactaacacactcaccactttctaaaaccatacataatttatgtttattattattttaggtcatcatccactagagtgtgaactctgtgaggcaggaccccatgtttagtgacatgtctttgatactaacagccatatctaatacatggaaggactcaactatttgtttgaatgaattcttataataggatacatttagtcttcaactggctggtaggctattaagatataaaacaaactggaaggattttgctgtttaaatcacacctacaatgtctacatttattagaaagggaattttcataaagcaacagtaaaaccaaaggacactgctatttgttgctgataatgttacaatagatatgatcaaatgataattaattgcacataagctcagggttgccacaaatatagttgaaatgacatctggctacttggcctgccaaaaaccaaggctgaagccaaatcccaatagcagatttttggccaaataccacaactaaagctgaacttcagtgcctctttgtcccttagataattcctcagtttaggtagtaagtattcacatgtctaacttgtgtattgtgtagcttatctattttgggagatgggaagaatctgatagcagccttttctcatgttgtactgaatagatgaggaaggattaaccctacacattgcctgggtgagagtaacatcttagaggttgttagttaacaggccagaactagaacacatggatgacaggaaaacatcaaagcttgcgtttttttatcaagcagaaggtgtttatagaggaaatgtgatttcactatttttgacttatcttcaaataccatagtaaagaacacaggctctggggtctgatatctgctctgccacttacccaggaccaatttcttactctctctgctttagtgagtgtcttcatctgtccagtaggaataataatactatctacctcatgagagagatgtcattaggatcattggagtttataagtgaagtgtttagaatagcatttgacatacagtaggcactatatgagatttttactattgttatttttgctatcacctttatcctcaggaaatgttttggcaaggtggtttggaaaaaacatgtatatatttttagcccaggattcaaattggctgcctgtaaccacattgaatccaccaccaagttttgtttgttcatccaaactgaaagtttattttttaacagtggagaaacccagacatttttcttttaaaagctccagatttctcacttctcttgaaaaattaaaagatctggaaatgataagcctaaatatatacctaatgataagcctaaatttggagttgtcaagaagctgccccccttggatgaacagtctctctggtttggatctgcctatgtctagtgctcttcactcatgtttctttctaagcttctatgggcagtttcgtttatgacctgtgttatggaggatcctgacatagtataaaagatatcatttaacccccttttatttagtgagagtggcttttatatgcttaaaaatacacaaactgttctagattcaaaagtgtatattaggctccttctctggtaaaaactatgttgagcaagacagaagtgagttctaccttcacggggtttctgttctatttgggtaaccgtatctcaaaaaagtactataatgcgaattctaatatatatttggaaggaaaccaactgaggtttgaaaaactgcgatcgaaaataaagatggagtagaagacaggggaatgaaagaggaagggtgttttctgagacgaaaccaaaatgttaaaaaggagcagctgtgcgggaagatgggcgcaggatctgcctttataaataaccctgaagtaggaaaggatatagcctacttagaaaagaaagaagatcatcgtggcaggtttccagatggctcagaatgatattggggagatcatgtggtttcatctgaattttacacctagtgcaatggaagatcaatgaaaggttttacacagaggagggacttataaagagaagactctagctgctccgcagagagctgaataagagctagcaagcacagaaacagggagatgaggaagggatttttttgtagcttacacagttgagagatgatggtgtcttgagccaggatggtgtcagtctaaatggagagaagtggacaaatttgacatctattttcaagatagaattaataagacatgattaggtgtaacctatggaggcaaagagaggaatgaaagatcactcagaagtttctggtttgagcagctaactggatgttggtgttatttagtgaaatagggaaaactggtgagagagagagggagaataagggatgcctcagtgtggtggggggaatcacaagtttcattttggccgtattaattgtgtaatttcttagttatagccaagagatgtcaagtaggctgtaacttgtaaatctaggtttccaaagagatctcaactaaagatatacagattagaggtcacacttgtcacacgaggtgtgtgcatgtgtgcatgtgacaaagaatgtagaaaccaaggggttttctgctggtccttgtctctaggaggtggtggcatcccttcagtttccctgcccctgctggtgctacttctttgatgattattatctttgctctgtcatcattggactgtgagtggcctaagggctcagctgttcagtttgaagggtaatggcacaacatgaaaggacttggctagaaatagctcatctggcctttctctttcagtctaatttttgatcctgttccccaaccatgtttacctgtggctaactgttttatacatctagtaaaaggagtccaatgcatttcgtaggcagttggaaaagaggaggaatagggctactgggatgagctggtgtggtcttggctttaaggcttattaatttcctgtaggaatatgagggtatatttgcttttcaccagcactgtcgtgatagttattagtggagttcaccaacatccacttcccctcccctcctgggttcttgggatactgtacttctcaatctcccagaacgactagttctagatagtggcctgtgagagaaagtggcatgctgcatttacaggctggggcagcaaaaaccccagtgcaatttccaacttcctttttctctttggggagtatggtggccacatgttaagatggcagagcccaaagtcaaaagagcttcaatcaccaagtcactgcgtggaagatagctgttcagaagctgacttatagcaaccttcgtttaagcaagaaataaactttcatagtgtccctagatttcaagggatgtttgttactgccccataagtgtagcctaactagattaatccaagtggcatctggaaacactgcaatgctgcatactcttaggctgtaagcacttcataggcaggaatcttgctgaacctctgatcaagtgcaaaccccaacaaagatgggtatgcttaactgttactctccagtcagtattgatcatgactttctttttaccagacagagagactgtcagtgctcttttcagtctgaactactgaactaaaattaaattgccatttgaagattttagaacttttctcctgggtcccagcaattgtttctgatgtcaggacattctagggcatgcatctctctagtgccccattttgtattgtatgtaagtgacagcaattagccactgcttccgtttactttcatgtggttcttgctttcctctaccatgtattgctgggtactcagcagctgtacctggtctcagttgctgggcttgagacttagaggtaaatattgttttaccagcgccattagtgtatgtgtgtgtgttgaggagtcggcgggcaggtggcggggggtgagggggggatgggtaatctgcttaagcaattattttgttttgaagaagctgacctatttttacctcctctatgcaaatctggtatatgtggcttaccatttacacatcaactttctgagacacaagtgcttctccttgaatgaccccttctcctctcatgcttacttggctaatatttatcagcaacatctggggtttagcacaatgaagttatttacagcagtgcttattagtgcacttctgtgagtcacaggtgtttctagccaactctgccattttgttgaggatggcaccctgtggaaccccaagatttgcagccatttatcaggaagcagaggcttgtgtgcattggtcaaaactcacagataatagagggaaaagaaatggttactgttgaaatggacattagaaatcatctaatccaacctgttcattttacttctgagaatattgacaggcaaagaaatgagttgacttgcagtagcctgccggaagtgaattatagagatgcaagtagaaattggaatttttccttctcagtccactatggcttttgtttcttgggactttattcagtactttaagcaggatatttatgagggaaatgctttgtttgtagattatttcttaagtatttttttcactcagggaagaagaatatgagaaatctcaagttgtgtctggttagttattttcagtgttctgagagtttcccaaccttcctcctggagtcctctttagagccatcacaaggttagggcagaacaggcctttagctttatattctgggtatggatggctcctgctgacaatggaatgagaaggggactggcatctctgactgctgtcgaaagtgattcccagggtcatgcatatttttctactcattcttttaaaaagtatatgtgatatttgatctatatataacagcaatgtaacatatgtttgtgtgactggtagtaaaattaacactggtgaacccatcaccaaatttatgaaataggcggcttgcttttaaattcatcatctcttgtgttcattggatgtgactgactctctcagttatatccttttcttttcttggtttgcattttgtctatctataaaatgttgttgcctaaacatatgtacaatgtcctctatctttaaaatagccacagttaaaagcaaccttttgtttctgtttttcacttcactcctcaaatatagcgatttataagactgtcagcagcctttttcttatgtttctatcattcccctccttggcaatctccatgaagatgacagctccttatctccaggcctgacttctctcctgggtcctcccagtggacaggtctacttgaatgtactccatttacatcaaagggcaacatcaaaaggagcaaaagaaatttgctttctcctttggccaccatcctaattttaaaaacatccttccttttaatcctaaataaatatcttcagggaataatttgtatatacttccagtatttactgcatcgtgcatgctgtgatttgatctgtggctacactgctggaactgtagtccgtaaagtcaacaataagttatgttttttcatcatcattccccttttttggtgctcgttctttgtcacttttctgcagaattttacattgtggatcaattcctgttttgtgtgtttgtttttggaagtgcactcccttccttcgtctatgagatgctgctgtaacctggtttcctgcctatctctctgacttttccctcctttcttttttttaataacctcttttacttttctttatttctcaaacagagtgacttctgagcctttcagcacccctcttctggtgtttcttactattcccctccttggcagtcttgatgccagtgacagccgatccttatcttcaggcccaacttctctcctgagtcctcctccttcactttcagctgcctggtggacatttccacttggatgtgctacaattatgttaacgggcaaaataaaagaaacacaacagaggaaaggttatatctcatcttcaggaactcataagcctttgacacaaaaatcaaggaggaaaatccagtgtgtatggtattagacggcagtcaagcacatttctcatccatctcgtcattctctgggaaggtcctttttaaaaatgctgtacatctaaattatttgattaacattatttttctaatttttttcttttatactcaattactggatgttggtttctatatttgtggactgaatagagattgattatattttatagctttctgaacaaaatttattaatcagataattccatgaaccataaactttaacacactaattacttttacctctagtcaggttgagagttgtaatttaacatttggcttcttttttattgacgacggtagttttaagactgatgtgatttggcagtgtctgcatccaaatctcatctcgaattgtagttcctataattcccatgtgtcataggagggacctggtgggaggtaattgaatcatggggatggttatctccgtgctgttcttgtgatagtgaatgatttctcacaagatctgatggttttataaggaatcttcccccaccttcaccctgtacttttccttgctgctgccatgtgaagaaggacatgttttcttccccttccaccatgattgtaagtttcctgaggcctccccagccatgctgaattgtgagtcaattaaacctctttcctttttaaattactcagtctcaggtatgtctttattattgcatgagaatatgagaatggacaaatataaagaaaatgataaaggttaaagttttgtatatttataaatgcttttaatttctattttaaattaactgtacagaagatcaatgcagataaaatttaaaatatagagatgtgtttttcttaaaaatttgttttcaccaaatagatttatttgctatacattatcaaaagtttcaatttttgtaatattgtggtcaaaacagcattattaaatcattaaatgtgttcatttttagtctgtttccttctgtttttgttttgcaccctggggagagggttttgtggggtttaaagcttacatagtttgggaaattttcctacaaaatttgaaacattaaaattagtatagtgtgagtattattttagaataataacaaaaatacaaatttaaaagagctgacaaataccacaaacatcacaaaatacagaaaaataagtttttattatctgagtgacataaccctgtaaaactttttggttttcatattttgactgtttgctcattaactgtctctttctaaaacaataagtttgtattatttttctatattaagaacagataatgcagtctttcctctattgtgtttgcctaaaatttcttggtattactgatatttggatttatatcatgtgacctctcacatgcgcatattcactggttataataatgatgtaggtttgagccctaaaataggaattattatacattctacctcctactattcggtatgaaagaaaaaaaaataaggtatgtttataattgtacatgctctcttgtcaaatatgttccacatttctcttttgttatctatgagaactaggtttttagctttcagtttttcatgtctaaagagggaaggatctctcaaagcctagctcctgcttcattacatttcagagcttttttcctccactacacacatttccatccactgtctcctgactcttagtaaatccaaatgggtggaagggtagtatagaagtattcttggaagtcattcgtactctcagacagctagtaataattctacatggctgtcagtgaactatatcataccataaagactatataaatgcatctcactaaactcaaactaaatgtgagtccacctcaacttctccttacctgggtccccagaatgtctgtggattctctaacattgcctgacaataggaaggcatgactgaggaaagtaggaatttaaagaaacaattatcttaattgactatggatgaaatatctcacttttgaaatttttggaaattttgccaaaatatcatgtgactccattggcaaggcccgttctcagccctgagcgaatgagaagtcttaaagcttaagttccctgagcctcacaatatatttgctccttttatcataaatatacataatgactcccaaaaagcattagattcctgaatcttctttaactgtttctgatatagttttagttttacattatttttgaaactttatttttaaatgtgtatttttaaataaaaatattttgtttattggcatcacccctgtcaacaaagagcacataatcaatttcaaattgaatttttacaacaccccattagatttctatacaggaatatattttaattttaaaatgcataattttgtataaccattcagtaagtgttacacactagattttctatgcatgtcacctaacttctacacaaagaagagaagaggagagaatgtttttaattacagcaaacacttgtagcagttatcagagaccaggtgctgttccaagtgcatgtcacatatgtccccacctctagttctggcagaattgcacaagagataagctaaaagccctcccactacaagttcaagaaatgctagataaaataaaaatcctaataagtgtatgatgagccttgtagggatgtaaagcaagtcaacagatgctcaaaacaaaaaggaaactgcaaatcagagaggtagatatgtgggactgccctgtggagcccttgctagagggctgatattaggtgttaatactcatttgtggttggaggtgggacagttggaactgccatccctgcataaaataggaactctcagaggactgtattctatgggaaagaatgatctaaagagtctgcccttgagtacaggaaagcaaaagtaactttatctgtcttaatctgggttctaggtaggggggaaaaaagggtcttcctggaaaaacttgagttcatgtacctgtcttcctatgcactccaggatctataagctgaataattcctaaatttgtgttgtgctagtgatagccttgggacagatgccagaaccaaaatccactctggagggaatccttttgagatattatagaatcattaaatatctctcattttttctccccctgaattgggacccaactaaaatttaaagtattgagtcaggcagctatgagtcagaatttctattcctgacaagtctggttgaacaacgaacagcatgagtttgctagcacttgagcctcaagcctgatccacttcttcatgaagtcttagctcagtgtcggccgggcgcggtggctcacgcctgtaatcccagcactttcggaggctgaggcgggtggatcgcgaggtcaggagatcgagatcatcctggctaacacagtgaaacccgtctctactaaaaatacaaaaaattagccgggcgtggtggcacgcgcctgtagtcccagctactcgggaggctgaggcaggagaatggcgtgaacctgggaggtggagcttgccgtgagccaggatcgtgccactgcactccagcctgggagacagaatcagactctgtctcaaaaacaaacaaacaaaaaaaacaaaaacaaaagtcttagctcagtgtcactgtctcagaccccatggattgtatgtggtctagcagtgcatccttgccaatatataagaatagatattatcaagatgttatatcttactggtaagatgtaacaattctaaagttccatacacctaataaaatagcctcaaaatgtataaataaattgaatggaaaaattcacaaatttacaatcatagaagaaagtattaacttccttagtatttgagacctaggtagaccacataaagaaaatatgaataacaaaataaagaatcttgatttattgggcaaagttagaaccctgaactaacaactaaaaaatatacattcttcttgtgcatacaaggcaaaaagtttcaggtgacaaaactaaagataaatatgctataacctagagatcccacttgcgtagatatactttttatatgggaaagaagatatttacagagatgttaattgtagaattatttgtaatggcaaaaatagtaaagaataaatgaaattttcatgagtagaagaccagataagtggattgttttattcatgcaagaatactaaatattagttaaaattattgaactagagttatctgactcaaaataggttggtctcaacctattttgacagttgtagaataatatatgaaacattatatttatgctaagcttaaaaaggtagaaaatatgagtgtatataaatagaagttacaggaacatgctaaaatttataaacaacaatgttaggattttatttctagaggcagggtaatatggagagcacaggctttacaaaggtccttgtgtttgaaatgttttgtttctgtttttaaaagatcttgaatttcattagttataatctcaaaatttgacaaatttgaatgaaaccacaaagatgcaaatatacatattagctacatgaaaaagtctgtgtaccactagaactcaggtcacaatgtgtctttggactcagatataccttctgccctttcctacctaccgtagttgaggtcatctttaaagactcatttcagatgctctttttctttataaaagcttctcagatctactccaaccccaatcaaaatgaaccttcctaaatgtcccctgtattagtctgttctcacacagctataaagatactacccaagactgagtaatttatatagaaaagaagtttaattaactcacagttctgcatggctgtgaaggccttaggaaacttacagtcatgataggcggggaagaggcatgtcttacatggcagcaggagagacagagcaagcaagagcagggaaaactgccttataaaccatcaggtctcttgagaactcactatcactagaacagcatggggggaaaagcccccagtgatccaatcacctcccacccggtccttcccttgacatgtagggattaccggcattacaatttgagatgagatttgggtggggatgtagagccaagccatatcattccctcactctttgcttgttcctctgttatggcccttatgtcatgagtaggtggacccatgtctatttctttctttctttctttctttcttttttttttgagatggagtctcgcactgtcgcctgggctggagtgtggtggcatgatctcggctcactgcaacctctgcatcccaggctcaagtgattctcctgcctcatcctcccaagtagttgggattacaggcagctgccaccacacccagccaattttttgtatctttagtagagacggggtttcaccatgctggccaggctggtctcaaactcctgaatttgtgattcgcccgcctcggcctcccaaagtactgggattacaggcatgagccaccgcacccagcccccatgtctatttctatcaccagattgtgagtttcttgaggataaactctgtgtggctttgttatctctggctatcagcaccatcacacttattagattctgaaaataacatataaattatattgacaattgcaattcaaagaatcttggagccccaaaattacttattggtgatagccaaaaggacttatgtaacatgtcatttgccagttggaaaaggtaggtcaaaatgtctaaaatattgtgattcataagtgatatatacaaaagggtcctgaccagttctgtctcatgagtcatgaagaatgccacccttcgttcaatacatcatggccatattagcaattctagaagaccatgctgagagtataggggtggcattttcagttctagaatttaaaaagatgaacattggattattgagaatacaaaagaatcatatactaagtgggattgttttccatttaaatctttgacacttgtttattaaggtcactggttgatagatttctgttccttacattttaatgatgagaatgcaggtgaggcataagagtgaggactccaaatgtaaattccagacctttgttcagtgctctgtccataagtattttgccctggcattctccagttccccattctcaggatgtgacttattcctcttcttttttctaagccagtttaatagaacatcactaacgataaggatagtcactggaaagcaccaaataccaaggactggtaattgtgcctcaaaattcactttactaagtgcaaattgacacactcctcaaggatccaattgtaactattacccaattttacattgcagttggaaagaggcttcattggttgtggttgagttgtctacagtataataaatactttctgatggtttgtttctctattcaggaagtgtaatgataaacatacaacagagccaggagctggtctgcaattcattggcactacagattatttaatagaaacatggagatttataatgtgctgatttgcagagtggaacagacctcttatttaaattttatgatatgaatattttttaaatattgatttggttgtcactatgggctatagaattcattggcttctttgattcattaacaaaaggctttgtatgtagtgtccctgggatagtgtggaggaagataagcctgttgttgcatatcaataacacaaagtgatgcactaggagaaatcctgctggcttcatttgtaggggaaatggagaggaggagtactgttgttttagggagatgaattcagtatctgtttttctggcacccactcaaaaagagagaaaaataccatgagaaaactgtgaaacttggctaggagtgttttagttgttttattagcgatttaaagaaaacaaagaacgggaatcaagtgtaaacataaacaacatcaggaaaggaattcttcagtatgttccctgaaaagatttttgtaaaaactaatttataattaatggatgtgaggaggtacgctgtgtgtggcttactttgttttattctcacatttgctctgctaaccaataacagatggatattaccccttttgtggttgttgaattattattttcctttattttctttccaaacccctaactggtcatcttgaggtgtaaatgcctttctcccaaatgcacaaacatggaaaaatatggcatattactcagggttctccagagaaacagaggagttagaaatccaaatctaaatctgtctttctattgaaagactaatttaaaaaattggctcatgtggttgacgtgtctgaaattcataggacaggcatgctgtctggaaactcaggcaggatttctatgttgcagtcttaaggcagaattctttctttgggaaacttgtctttgcttttgaggccttcaactgattgggcgagacccacccatatcataaagggtaatctgctttaaagtcaattggttgtagattttttttttttagttcttttttattattattatactttaagttttagggtacatgtgcacaatgtgcaggttagttacatatgtatatatgtgacatgctagtgcgctgcacccagtaactcgtcatctagcattaggtatatttcccaatgctatccctcccccaaccccacagcagtccccagagtgtgatgttccccttcctgtgtccatgtgttctcattgttcaattcccacctatgaatgagaatatgcggtgtttggttttttgttcttgcgatagtttactgagaatgatgatttccaatttcatccatgtccctacaaaggacatgaactcatcattttttatggctgcatagtattccatggtgtatatgtgccacattttcttaatccattctatcattgttggacatttgggttggttccaagtctttgctattgtgaatagtgccgcaataaacatacgtgtgcatgtgtctttatagcagcctgatttataggcctttgggtatatacccagtaatgggatgtctgggtcaaatggtatttctagttctagatccctgaggaatcaccacactgacttccacaatggttgaactagtttacagtcccaccaacagtgtaaaagtgttcctatttctccacatccgctccagcacctgttgtttcctgactttttaatgattgccattctaactggtgtgagatgatatctcactgtggttttgatttgcatttctctgatggccagtgatggtgagcattttttcatgtgttttttggctgcataaatgtcttcttttgagaagtgtctgttcatgtccttcgcccactttttgatggggttgtttgtttttttcttgtaaatttgtttgagttcattgtagattctggatattagccctttgtcagatgagtaggttgcgaaaagtttctcccattttgtgggttgcctgttcactctgatggcagtttcttttgctgtgcagaagctctttagtttaattagatcccatttgtcaattttggcttttgttgccattgcttttggtgttttagacatgaagtccttgcccatgcctatgtcctgaatggtaatgcctaggttttcttctagggtttttatggttttaggtctaatgtttaagtctttaatccatcttgaattgatttttgtataaggtgtgaggaagggatccagtttcagctttctacatatggctagcaagttttcccagcaccatttattaaatagggaatcctttccccatttcttgtttttctcaggtttgtcaaagatcagatagttgtagatatgcggcgttatttctgagggctctgttctgttccattgatctatatctctgtttcggtaccagtaccatgctgttttggttactgtagccttgtagtatagtttgaagtcaggtagcgtgatgcctccagctttgttcttttggcttaggattgccttggcgatgtgggcttttttttggttccatatgaactttaaagtagttttttccaattctgtgaagaaagtcattggtagcttgatggggatggcattgaatctgtaaattaccttgggcagtatggccattttcacgatattgattcttcctatccatgagcatggaatgttcttccatttgtttgtatcctcttttatttccttgagcagtggtttgcagttctccttgaagaggtccttcatgtcccttgtaagttggattcctaggtattttattctctttgaagcaattgtgaatgggagttcactcatgatttggctctctgtttgtctgttattggtgtataagaatgcttgtgatttttgtacattgattttgtatcctgagactttgctgaagttgcttatcagcttaaggagattttgggctgagacaatggggttttctagagatacaatcatgtcatctgtgaacagggacaatttgacttcctcttttcctaattgaataccctttatttccttctcctgcctaattgccgtggccagaacttccaacactacattgaataggagtggtgagagagggcatccctgtcttgtgccagttttcaaagggaatgcttccagtttttgcccattcaatatgatactggctgtgggtttgtcatagatagctcttattattttgaaatacgtcgtcccatcaatacctaatttattgagagtttttagcatgaagggttgttgaattttgtcaaaggccttttctgcatctattgagataaccatgtggtttttgtctttggttctgtttatatgctggattacatttattgatttgcatatattgaaccagccttgcatcccagggatgaagcccacttgatcatggtggataagctttttgatgtgctgctggattcggtttgccggtattttattgaggatttttgcatcaatgttcatcaaggatattggtctaaaattctctttttttgttgtgtctctgcccggctttggtatcaggatgatgctggcctcataaaatgagttagggaggattccctctttttctattgattggaatagtttcagagggaatggtaccagttcctcctcgtacctctggtagaattcggctgtgaatccatctggtcctggactctttttggttggtaagctattgattattgccacaatttcagctcctgttattggtctattcagagattcaacttcttcctggtttagtcttgggagagtgtatgtgtcgaggaatttatccatttcttctagattttctagtttatttgcgtagacgtatttgtagtattctctgatggtagtttgtatttctgtgggatcggtggtgatatcccctttatcattttttattgcatctgtttgattcttctctctttttttctttattagtcttgctagcggtctatcaattttgttgatcctttcaaaaaaccagctcctggattcattaattttttgaagggttttttgtgtctctatttccttcagttctgctctgattttagttatttcttgccttctgctagcttttgaatgtgtttgctcttgcttttctagttcttttagttgtgatgttagggtgtcaattttggatctttcttgctttctcttgttggcatttactgctataaatttccctctacacactgctttgaatgtgtcccagagattctggtatgttgtgtctttgttctcgttggtttcaaagaacatctttatttctgccttcatttcgttatgtacccagtagtcattcaggagcaggttgttcagtttccatgtagttgagcggttttgagtgagattcttaatcctgagttctagtttgattgcactatggtctgagagacagtttgttataatttctgttcttttacatttgctgaggagagctttacttccaactatgtgttcagttttggaataggtgtggtgtggtgctgaaaaaaatgtatattctcttgatttggggtggagagttctgtagatgtctattaggtctgcttggtgcagagctgatttccattcctgggtatccttgttgactttctgtcccgttgatctgtctaatgttgacagtggggtgttaaagtctcccattattaatgtgtggtctaagtctccttgtaggtcactcaggacttgctttatgaatctgggtgctcctgtattgggtgcatatatatttaggatagttagctcttcttgttgaattgatccctttaccattatgtaatggccttctttgtctcttttgatctttgttggtttaaagtctgttttatcagagactaggattgcaaaccctgcctttttttgttttccatttgcttggtagatcttcctccatccttttattttaagcctatgtgtgtctctgcatgtgagatgggtttcctgaatacaacacactgatgggtcttgactctttatccaatttgccagtctgtgtcttttaattggagcatttagtccatttacatttaaagttaatattgttatgtgtgaatttgaacctgtcattatgatgttagctggttattttgctcgttagttgatgtagtttcttcctagtcttgatggtctttacattttggcatgattttgcagcggctggtaccggttgttcctttccatgtttagtgcttccttcaggagctcttttagggcaggcctgctggtgacaaaatctctcagcatttgcttgtctgtaaagtattttatttctccttcacttatgaagcttaatttggctggatatgaaattctgggttgcaaattcttttctttaagaatgttgaatattggcccccactctcttttggcttgtagggtttctgcagagagatccactgttagtctgatgggcttccctttgtgggtaacccgaccttgctctctggctgcccttaacattttttccttcatttcaactttggtgaatctgacaattatgtgtcttggagttgctcttctcaaggagtatctttgtggcgttctctgtgtttcctgaatctgaatgttggcctgccttgctgggttggggaagctctcctggataatatcctgcagagtgttttccagcttggttccattctccctgtcactttcaggtacaccaatcagtcgtagatttggtcttttcacatagtcccatatttcttggaggttttgttcatttctttttattcttttttccctaaacttcccttctcgcttcatttcattcatttcatcttccattgctgatacccttttttccagttgatcgcatcggctcctgaggcttctgcattcttcatgtagttctggagccttggctttcagctccatcagttcctttaagcacttctctgtattggttattctagttatacattcgtctaaatttttttcaaagtttttaacttctttacctttggtttgaatttcttcctgtagctcgtagtttgatcgtctgaatccttcttctctcaacttgtcaaagtcattctccgtccagctttgttccattgctggtgaggaactgcgttcctttggaggaggagaggtgctctgctttttagagtttccagtttttctgctctgttttttccccatctttgtggttttatctacttttggcctctgatgatggagatatacagatgggtttttggtgtggatgtcctttctgtttgttagttttccttctaacagacaggaccctcagctgcaggtctgttggagtttgctagaggtccactccagaccctgtttgcctggttatcagcagcggtgtctgcagaacagtggtttttcgtgaaccacgaatgctgctgtctgatatttcctctggaagttttgtctcagaggagtacctggctgtgtgaggtgtcagtttgcccctacttggggggtgcctcccagttaggctgctcgggggtcaggggtcagggacccacttgaggtggcagtctgcccgttctcagatctccagctgtgtgctgggagaaccactgctctcttcaaagctgtcagacagggacatttcagtctgcagaggttactgttgtctttttgtttgtctgtgccctgcccccagaggtggagcctacagaggcaggcaggcctccttgagctgtggtgggctccacccagttccagcttcctggctgcttcgtttacctaagcaagcctgcgcaatggcgggcgcccctcccccagcctggctgccgccttgcactttgatctcagactgctgtgctagcaatcagggagactccgtgggcgtaggaccctccaagccaggtgcgggatataatctcgtggtgcaccattttttaagtctgtcggaaaagcacagtatgtgggtgggagtgacccgattttccaggtgccgtctgtcacccctttctttgactaggaaagggaactccctgaccccttgcacttcccgagtgaggcaatgcctcgccctgcttcggctcgcgcacggtgcgctgcacccactgacctgcgcccactctctggcactccctagtgagatgaacccggtacctcagatgaaaatgcagaaatcacccgtcttctgcgtcgctcacgctgggagctgtagactggagctgttcctattcggccatcttggctcctcccctccagttgtagatgttaacaaatacctttagagtaacatctagacacatttgaccaaacaactagacaccataacttaaccaagttaacacattaagttacccatcacatggggtgtgtgtgtgtgtgtgtgtgtgtgtgtgtgtgtgtgtgtatgtgtgtttttagtgtaaagggtattatgaacacattgtaagttattaggaaatttggaaagggaaggaatcatatatctattaccccactggagcctgttttgttttcttccagtgtttttataaaagggtatcttttaaaatatcgtgaacatatttgctatatgttacagcttttgtctgttgctcatatttgtcccagttgtcagagcaaaagcactaacatgggaacttgaggccctggatgcttgtccattctctgtgtaatttcattctttgtctattctctcactaatttcttcatgagttgagaaagaaataaggtcctcctgggctgtggtttccttctctgtttatgaagagttgggtttggtaacctcgagtgaccttttcagcttgaatattttattaatccaggatgtcctcaagtgtgttacatgtacccctctatcactatatgccagaaggttggaggtcgtgtgaggatgaacagtgtttgatttagtaatttaacattttgtatatttgaaaaaaatagaattaacacatcaaatctggttttctgtggttatttcttaggacaaggtgaaaactaacaaagggaattactttaaagaaaaatactagaaaaatacatattttatatggtatagaaaaaagttagaaatgaccaaagtttgggatgtatactataataatctgtgagtgtgattcagtatgctctcaccctacctttcaagaaacccataaagactggagttctcttagcagacagcagtgtggatagatcattgctcagttaatactttgcccaacctgtattgtacacttacttgtgctaagtactgtgtaaggtgcaagaatctttgggtaaatgagatgtggatttggcccttggtcagttagtctagtggggcaagggaagtgtaaatgattaattacaacccaatactttatctacagtaagagaagtatgttctagggaccaggctggggataacagaggggagaaactagccttactcaaaggacaccaaaaaaaaagcctcactgaagtcattcttgatttggccaacaaattggcgatggacattcaggtgcagggaacaggaaagaggttgtccagagaatttcagcagactcataggtgtttgctgctacattttttttaaaaaagacgtgcctgtggaacatgctgttgtaaaactttttccctggtcacgagtggcaagctcgcactaatctttcagtattcacaggttagattctgtaatatttgccatctctgcgtttatctgttacctaacttggagcttctatttctttactcctgaatgagtctcaagcaaaagtctgaatattctgtaaacattctttttcagtatggcttttgtccttcttttaagaaagaaaagaaaaatggttttcagtgatcttggatgagggaaatctttgtatccttaattaaatgcctgaatttggttttgtgtttgctaggagcctactgtaaagcaaactgatgtggccttctgttctcttccaggcaccaagtgtttgctgggctcagttcccaatgagtctgtgtaatgcattccttctgtcccaccccatattgcagatctgtggaggctgacatcatcaccttgaataataaagctattcccaaatgtaacaagttgaagtgcctaaatggaggaatgcggggttagagaggtgcagcggggctttccagtgagttcaacattgtaattgtggtttgcctgctattaaaaaaatcttctagaaatgtctcattgtaattaacagagattaaacatttaaatttaaagtattttatagggctaatttattgctccattgccatctgccctgaaagcagatctgttgatctgttcccttgacagccagtgagattcaagtttgcctcccctcccggtgggccccttctcgaccttggaagctgataagaatcctatggacaaagctcgggtgggctgccaggaaaaaatgttggattcagtgttatctctggttgagagcagaataatgctcttcttttcacatcagggctgggatttacagaaacccctcccaattccacctcttcatttaatgctaagtgctactcaacattgtccaggtcttggcttaaatgttaattggtccaggagccttgcctgaccacctaaggcttggtttagtccccttattctattctctgatagtaccctgtgcttttcttctcatcacacctgggtttctcgctgcactgcaagctgtgtgaaggcaggaatgatggcatttgtttggagcttgctttgtgccacgaactattctaaatgttttacatgtgctccatggagaggtatgtgacagaggttaagggtcccggttttggagctcgaccactcacataagctctgtggagtaactgaaggcagtacctgggctctggctttgcagttgggaacaatcagctcggtctctcactagctatgtaactcagggaatttcatcccacctgccaggcatgtaaccacagattaaccaagactctagtggaagcttgacacatgttaactatatttcatctgttcaaagatgcataatttttaaaccttttaacatttccgaaattgggaggcatcttacagttgcttgcatattatgatttcattgccagtatgttttttcttttctattcctaaggaaaatgtaaaataatgatgtcttgggttcatcaagattcattgaagtatgttatctctttctctttcctccactttgggcgaagactatggtgttttgaagaagtagataccctaattcaggagtcctaatgatgacctatgcataaatacctgtgtggtgtttagaattgcctgggattcttgttttttgttttgttttgtttttgagatggactctcactcttgtcacccaggctggagtgtaatggcacgatcttggttcactgcaacctctgcctcccaggctcaagcgattctcctgcctcagcctccccagtagctgggattacaggtgcctgccactacacctggctaatttttgtatttttagtggagatgagatttcaccgtgttagccaggctggtctccactttctgacctcaggtaatccacctacttcggcctcccagagtgttgggattacaggtgtgagccactgtgcctggcctggggttcttgttttaaaatatatgtgtgcatgtttatacatgcatgtgtatacatgcacacacacatatttatatagttttggacctcatccaaggtctaccgacttgtagttatttgactgaggcctgggcactggcattttatcagttgccctagagggttctgttgcagctagtgtgaaacaatttgaaaaccagtgatctcattcgtctgctgttggctttaacttccagtcactactttgcctttttatatttaatttcttcttctcttcgttatatgtcgaagcacctagcacaatgcctggcacatagaatgttctcaagaaaactaacatgtttcctcatcctttcaccttaatgtttctgaaattgtagggaggcagagttggaggatgtgctgaagaaatagtggtgtggtgagatgagagctactgactgaactttctccaagttgttagcagggaatgaaggttgagaaggaagcaggaagccagacacctctgcttgcatggtttttggctgtctctgaatcttggcggtttttcccttgggtctctataatgtctatcaagtactttagtttcagtgtgattttcaaggaatgtgacctggggtgaaatccctggagcaaccgtgtacactctttgactgactttcagccctcgcaaatctaaacatcttgtgcttggaaaatccagactataagaaggccttttgattggcctgtttctgattataggtaagtgtgactcttacctctgaaaccctagagacacctctcatgtgctttccccacttcccaagctactgcttccatttggccctattgtgcatccttcaatccttcaacacccttttctgaaggtttttgtggaagactacttcactttaccaagcccttagaactttgtatagctattattttgcacttaaattattccaaaatattgtgaaagtgaaatatgactcatttttgtgccaccacatacttagaacacaaatgatgatatttagttgaatatgtgaccaggaaaaggttggaatgagtattgccatttggagaagagccgacggactcgcctaaaccatggagagtttcagttttgggtgggatgggtagggtggattgggaacagatggtgaaagacaggacaccagacccgagagcttatactttgttctatatgcagagagagccaaaagatttttttagcaggagaatggtggggtgaaaaggataattgggtaagattcatttagccccggttatttggcatggagagaccctggagataaaggaatgaaaggtgaatataaagaccattctagaaatgtgtgcttgcctaagactttaaatggtgtcagaaggaatggggagtgaggaattaatgcaaatatatattctgaaggaagactttattggtgaaggacaggggtatctaaacttttggcttccctgggtgacactggaagaagaagagttgtcttgggccacacataaatacactaatgctaacgatagctggtgagctaaaaaaaaaaaaaaaaagaaagaaagaaagaaaagaaaaaaaaatctcataatgttttaagaaagtttatgaatttgtgttaggccacatttaaagctgtcctcggccacatgcaggccgcggattggacaagcttgccataggatgtggactcaagattcctaaggtttccactgtgaactgaagtagggaaagaaaagctggctttaaaaggtgcgtttttgtttgatcactttaggctttgaaatgaagggagctcttctacagagaaatactaggcaacaattagagactcggaatgagtgaccagtagatagatcagtaattgagataagagatttggaagttgtacacaaagaggtttaattggcatcgtgagtgtgggaagtgggtttaggactaagtgcacatactctggggaatgtccacagtgaggcgggaggcgggagtcagcaagtctgcaggaccctgggcgtggaacagacctttcaagggtcgatttcctcccatcctcttagaattttctttggagagggaactaggctttcaaagataacccccttttccttcatttttagtgtttttaattcttattttttctcatctttttcctttttttcatcctttcatcctttttccttccttattttctcgcctccctctttccttcacttcttccattccctcttttatgtctatgttggcttcctttgtactactgtagtgcaaagatgcttgggaatttagctgtaggctagggacaaccttgcatgtaagatggtagtgtagatagaaaggaaaatatagacaaccttgggaagtccgtggttctgttctttattttacatgcacaagattcttttgtccctcaagggtgaatcattcctcaaaatagaaataaaatgcattttgttaaatggtatttacaggcagcttattacctgaatgtgcacaagtttggaaattaactttcacttggatctagttatatataatctcataaaagtgattgtcataaaattacctttccttgttctctagtttcttggttctggaagacctgggaaagcttctcacattcttatgcagtgatgttgggaattgaaatcagagtgctctccccatctccaaatgcccttagaaccacattcccttagaaactggaatttaaaaggtatatttaagattataccatttttagtacgatattttaaatattcacatttgttgcaaatattgtgatcttgtgaatattttaaattatatctaagacatttcatcatagttattttattttcaaaaccaaatactatttggaaaattaatggaaatagatgtatctattttttcattgagaataagaggatctagttatcttcacagatctcaaagaaagagtatctttttggtactcttatcttgctatttggttttcttatcctgctattatctggaagtccctgacacttacttattgtctatgcagccagggtggcctatttctcactggcttaatagttttttcattcttgcatgcagtaaaatagactgcccttttcaaaggacatatgcctaccctctaggattgcctgctcatctcacctttctttggtttatccccactaagatatttggcacggtccttttcaagaatcagaatattgctgggcaccatagcttgcatctgtaatcccagctactcaggagactgttacaggagaatcacttaaggccagaatttcaagaccagcctgggtagcatagcgagactccatctcaaaaaattttaaaaagaaagaatgaaaatactcaaagtcaacatgagttaacacatttcttgccttgatcaattcgtacctttgtgtattttgtttgtcagttactgaaataagtatgtatatgtacttggtcatgggtaaattataaaataatgtaaaatttttttaatatttgaaatttgtctataaggaatttacaatctaattacatggtaataacttagaacagcaaactgttcctgaaaggccaaattctgcctcttcccgctattttataaataaagttttattggaatatagccacacacagtcacttacctactgtctacaattattttcatgctacagtggcacatttaagtaattttggcagagattgtatatcccacaaagtctaaaatgtttactgttgggtcctttatagacaagagttttcttgactcttagcttaaaaacactgatgtgtaagtcaactgatgcccaatgacttgcccaaggtatgtggataggcagtttcagattagctacaaatatatataaaatattttatgcttacttgaggaagggtaaggcttagagccagaaaggcatggattgaaatctctgctcttctctttcattcttgtatgactttggacagtggcttaaactcagagccccagttgcctcatcagaaaagtgggctcactagctatctacttcctgggtcataaagatgtgatgaaataacacacaatatagtatacaatataggtacaatatagtaccgaaacataccagcatgtggtagtttttcttggttggcttcatcctctgggaaagacaggtccttatagctctaggtttacgcaattctgccagttgagatttaagaaactcttgttctctctcccagcatcatttcatcttctgaaaaaggatcctgatttaccctgctcaggtcacatgtccacctctgggccagtcactgccccatcaggatcctatggcctgatggaagggtgtgtcccatcagaaaggaatgaagacaaaaaaatgacatttcacagcagtgtacttacctttgtttgatcttatcatttggctcctacccaatctttgcatatattccagcttgagataaaaattttcaagagctaaggcctagaacatatgtggcattttttttttatggccagttgcaatggtgcaggcttaaggagcagaaaggcccctttatgtaacatcaatagtggcaacagcagcagtttatttaattcctctgatatgtttagaattctgtaaaagacgcagcctgtgagattcttaactttccatcaaccttgacaaacagtaggggtgattttcacatagccaacacacccctgtatatatacacacccagggttatgcacaattcactgcatgctgatatattagatttctcttccactaagaaagcatatgggagtgcaagggagactgacaatattacagatgaccttgaatctgctcaggaaaaagcaatcataaagcactaggcaactttagcactttattataattaaaaaattactaatgacatacctcatcactgatcataatactctggggacctgtgtcatggcaactgagaaccactaccctggaagaatttggagtcaccttaggatgatgagagagacttttaaaatgagtgacaatacaaggttgagtgcccatgaaatagaactggcatctggaacagctgaaagtgtgagattctcatagatagaggattaatgtgtttctgggcctgtgttagttatgggtctcttgttataagaagcagagactcctgccagttaacataagcaaagaaggacaacttattttaaggatggggtggtatcctatagtactccatcatctgaaacaacatctttcacatattaagtatgtagtaaatatttgttgaataaatgcatcatctcaaccagaaagtcattagaaacccagaaagtattctgtctccaggtttttcctctgcttctatgtgcatatatcttttttcccttttcatccctgctactggcttctctgtttcccagtccacatggcagcacatggccacccatggatggcacttgagtttatactattcagttttagttgtataatgaggctgacttgacttcctcatgcccaactctaaattctgaaaaagagagaatgtgattgcctgatgagagctagtggcccacctgtgacacaaacatggtgaccagcagttcttccccaggaccctgtggctctggggtgggggtatgggcagcattctcaaatgcaaagaaattaatttcagactaggaagaaactcccaagagtgtccactatgagcccaatcagatagatgtcataaaaaattctaaagctaactctccatgtaccaagacaggattttctggggattggtggttgaagctggagtcaaaatagttcagcctcctgatcctgggtagaagtcagccatactcttcttctagggtaattatcactcatgttctatgccagccaagagaacacagaattgtctttagcgaaagtgtcaatttgaggcttcctaattttcatgatagcagctacttggtactgaataataatggaattctattcctggacttcgtgattccatctctgagcaaatgcaaagcagatcttggcaggtatatctatatatgatcagcaatgccaaggcacttcttgctgctaaagcaatgcagcagatgtgagtgacatttttaggccgtttgtgctgaatgtaataatgttttaatgtggaatgcctcacatattactcttgggagatggcttgaattgctagaaagggtcaataggtttatatcctagttaggtaatttgctacctctgaaatatcaggcaaatttcctaacctttctgagttttggttttgttatttgcaacatggagataatgatattttgggaggaaaaaagaacatacaaatagatgccttatatactatacacaaaaataaattccaggggaggcagagcaggatggctgagtagagacttccaccaattatccttcctgcaggaacacctaattaaacaactgtccacacaaagagcaccttcgtaggaaccaaaagtaaagtgagttgatgacagtacctggttttgactttatatcactgaaacaggcactgaagagggcaggaaagacagtcttgaattgcctacaccacttctctctcattcccctgaggtgcccatgtggtggggagagagaatctgtgccctttggagagggagagcacagtgattgtgggactttacattggaactcagtgctgccctgtcacagtggaaagcaataccaggcagaactcaaccagtgtccacaggggagaatttaaaccagccctaatggaggggaattgcccatcccaatggtcagagcctgagttctggccagccctgccactgtaagctaaagggctctggggtcccaaataaacttgaaaggctgcttaagccacaaggactacagttcttgggcaagtcctagggctgtgctgggcttgtagccagtggacttgaggggcatgtgacctagggagacaatagctgaggcagccaagggagtgcttgcaccacccctccccaatcccagagagagggagagagagaaagagagacagacagacagacagacagacagacagagactaactccatttgtttgggagaaagtaagggaagagaataagggtctttcctggtaatccagggaattcttctggattttactcaagaccaccaatgtggcacctctacaacaaacacagcattacttgtttggggtgctccctagtgcagatgtggctgcaatgatccaaaacttagatcacaacacctaagtcccctccaatacctggaaagccttcccaagaaagatgagtacaaacaagcccagactgtgaagactacaataaagacataattcttcaatgcccagacactgacaagcatcagtgtaatccaggaaaacattacctcaacaaaaggactaagtaaggaaccagggaccaatcctggagaaacagcgattccgggtaactaaaaacagatatgtgacctttcagacagagaattcaaaatcgctgtgttgaggaaactcagccatatacaggataacacagagaaggaattcagaattctatcagataaatttaataaagagattgaaataatttttaaaaaatcaagcagaaattttggagctgaaaaatgcaattgacatactgaagaatgcatcagtgtcccttaacagcagaattgattgagcagaagaaagaattcgtgagcctgcaaacagactatttgaaaatacacagtcagaggatacaaaagaaaaagaataaaaaagaatgaaatatatctacaagatctagaaaatgcctcaaaggggcaaatctaagagttattgccctaaagagaagatagagagagagggggatagaaatattattcaaagggggtaataacagagaacttcccaaacctagagaaagatatcaatattcaagtacaagaaggttatagaacaccaaacagatttgacccaaagactacctcaagacttaataatcagactctcaaaggtcaaggataaagaaacgatcctaaaaacaccaagagaaaagaaacaaataatataaaaaggagcttcaatgtatctggaaacagacttttcagtggaaagcttacaggccaggaaagagtggcatgaccaatttaaagtgctgaaggaggaaaaacttgtatcctagaatagtatatccagcaaaaatatccttccaacatgaaggcaaaataaagactttcccagacaaacaatagctgagggatttcatcaacaccagacctgtcctacaagaaatactaagggaagttcttgaatctttaatctgaaagaaaaggacattaatgagcaataagaaatcgtctgaagatacaaaactcactgttaatagtaagtacacagaaaaacacagaatattataacactgtaattgtggtgtataagctcatatcttgagtagaaagactgaaagatgcatcaatcaaaaataactacaacaacttttcaatacatagtacaatacgatataagtagaaataacaaaaagttaaaaatggaagtggggtggggaataacaaagttaaagtatagtttttattagttttctctttgcttgtttgtttatgcaatgagtgttaagttgtcatcagtttaaaataatgggcaatatcatatgcaagcctcatgataacctcaagtggaaaaacatacaacacgcatcagaaggtacataagtctgggcctctgtatccatttatgtgtgtgtgtgtgtgtgtgtgtgtgtgtgtgtgtgtgtgtttgtgtatcagtctacatagctcaatctaaactgatagtaaagtgaaaggaacattgtaatataatgccaggtatttttaaatatattacagaggtaactaaatagtaaatagtatctgtaaaatctacaggtagggagaaaggcaaggaaagcattttaaagattttatcttatatcaggagaggaggaaagctgtaagggaaaagaaaacagatagagggggtgtgggcagggaatgaggacatatttggtatcctatatcctaatagaaaattagcatggttaccaggataatcactagtggaatggaaacagaaaagtagaacttagaaattaacttgggtacaggggaggttccaagatggccgaataggaacagctccagtctacagctcccagcgtgagcgacgcagaagacaggtgatttctgcatttccaactgaggtactgggttcatctcactggggtttgttggacagtgggtgcaggacagtgggtgcagcccacagaccatgagctgaagcagggcaaggaattgcctcacccgggaagtgcaaggggtcagggaattccctttcctagccaaggggagccgtgacagaaggcacctggaaaatcgggtcactccaaccctaatactgcgcttttccaatggtcttagcaaagaccacaccaggagatgatatcctgcacctggctcagagggtcccatgctcatggagccttgctcactgctggcacagcagtctgagatggaagtgcaaggcggcagcatggctgggggaggggcgcccgccattgctgaggcttgagtaggtaaacaaagcagctgggaagctggaactgggtggaacccaccacagctcaaggaggtctgcctgcctctgtagactccacctctgggggcagggcatagctgaacaaaaggaagcagaaacttctgcagacttaaacatccctgtctgacacctttgaagagagtagtggttctcccagcatggagtttgagatctgagaacgggcagactgcgtcctcaagtgggtccctgacccctgagtagcctaactgggaggcatcttccagtaggggcagactgacacctcatacagccaggtgcccctttgagacgaagcttccagaggaacgatcaggcagcaacatttgccattctgcagtatttgcagttctgcagcctccactggtgatacccaggcaaacagggtctggagtggacctccagcaaactccaacaaacctgcggctgagggtcctgactgttagaaggaaaactaacaaacagaaaggacatccacaccaaaaccccatctgtacctcatcatcaaagaccaaaggtagataaaaccacaaagatggagagaaaacagagcaaaaagctgaaaattctaaaaatcagagtgtctgttctcctccaaaggaatgcagctcctcgccagcagtggaacaaggctggatggagaatgactttgacaagttaagagaagaaggcttcagaatatcagtaaaaacaaacttctccaagctaaaggaggatgttcgaacccatcacaaagaagctaaaaatcttgaaaaaaacattggatgaatggctaactagaaaaacggcatagagaagagcttaaatgacctgatggagctgaaaaccatggcacgagaactacatggtgcatgcacaagcttcagtagccgattcgatcaactggaagacagggtatcagtgattgaagatcaaatggatgaaatgaagcaaaaagagaaatttagagagaaaagagtaaaaagaaatgaacaaagcctccaagaaatatgggactatgtgaaaagacaagatctacgtctgattggtgtacctgaaagtgacagggagaatggaaccaagttggaaaacactctgcaggatattatccaggagaacttccccaacccagcaaggcaggccaacattcaaattcaggaaacacagagaacaccacagagatactcctcgagaagagcaactccaagacacataattgtcagattcaccaaagttgaaatgaaggaaaaaatgttaagggcagccagagagcaaggtcgggttacccacaaagggaagcccatcagactaacagcggatctctctgcagaaactctacaagccagaagagagtgggggccaatattcaacattcttaaagaaaagaatttgcaacccagaatttcatatccagccaaactaagcttcataagtgaaggagaaataaaatactttacagacaagcaaatgctgagagattttgtcaccaccaggcctgccctaaaagagctcctgaaggaaacactaaacatggaaaggaacaaccagtaccagccactgcaaaaacatgccaaattgtaaagaccatcgaagctaggaagaaactgaatcaactaacaagcaaaataacaagctaacatcataacgacaggatcaaattcacacataaaaatgttaacctcaaatgtaaatgggctaaatgctccaattaaaagacacagactggcaaattggataaagagtcaagacccatcagtgtgctgtattcaggaaacccatctcacatgcagagacacgcataggctcaaaataaagggatggaggaagatctccaagcaaagggaaaacaaaaaaaaaaagcaagggttgcaattctagtctctgataaaacagactttaaaccaacaaagatcaaaagagacaaagaaggtcattacatcatggtaaagggatcaattcaacaagaagagctaactatcctaattatatatgcatctaatacaggagcacccagattcataaagcaagtccttagagacctacaaagagacttagactcccacacaataataatgggagactttaacaccccactgtcaacattagacagatcaacgagacagaaagttaataaggatgtccaggaactgaactcagctctgcaccaagtggacctaatagacatctacagaactctccaccccaaatcaacagaatatacattcttctcagcaccacatcacacttattccaaaattgaccacatagttggaagtaaagcactgctcagcaaatataaaagaacagaaattataacaaactgtctctcagaccatagtgcaatcaaactagaactcaggattaagaaactcactcaaaaccgctcaactacatggaaactcaacaacctgctcctgaatgactactgggtacattaacgaaatgaaggcagaaataaagatgttctttgaaaccaacgagaacaaagacacaacataccagaatctctgggacacatttaaaacagtgtgtagagggaaatttatagcactaaatgcccacaagagaaagcaggaaagatctaaaattgacaccctaacatcacaattaaaagaactagagaaacaagagcaaacacattcaaaagctagcagaaggcaagaaataactaaaatcagagcagaactgaaggaaatagagacacaaaaaacccttcaaaaaattaatgaatccaggagctggttttttgaaaggatcaacaaaattgatagaccgctagaaagactagtaaagaaaaaaagagagaagaatcaaatagatgcaataaaaaatgataaaggggatatcaccaccgatcccacagaaatacaaactaccatcagagaatgctataaacacctctacgcaaatgaactagaaaatctagaggaaactgataaattcctggacacatacaccctcccaagactaaaccaggaagaaattgaatctctgaatagaccaataacaggctctgaaattgaggcaacaattaagagcctacgaaccaaaaacagtccaggaccagatggattcacagccgaattctaccagaggtacaaagaggagctggtaccatgccttctgaaactattccaatcaatagaaaaagagggaatcctccctaactcattttgtgaggccagcctcatcctgatatcaaagcctggcagagacacaacaaaaaaaagagaattttagaccaatattcctgatgaacattgatacaaaaatcctcaataaaatactgtcaaacagaatccaggagcatatcgaaaagcttatccaccatgatcaagtgggcttcatccctgggatgcaaggctgattcaacatacacaaatcaataaacataatccatcatttaaacagaaccaaaggcaaaaaccacatgattatttcaatagatgcagaaaaggcctttgacaaaattcaacaaatttcaacaaaagtcacgctaaaaactctcaataaattaggtgttgatgggatgtatctcaaaataataagagctatttatgacaaacccacagccaatatcatactgaatgggcaaaaactggaagcattccctttgaaaacgggcgcaagacagggatgccctcgctcgccattcctattcaacatagtgttggaagttctggccagggcaatcaggcaggagaaagaaataaagggtattcaattaggaaaagaggaagtcgaattgtccctgtttgcagttgacatgattgtatatttagaaaaccctatcatctcagccccaaacctccttaagctgataagcaacttcagcaaagtctcaggatacaaagtcagtgtgcaaaaatcacaagcattcttatacaccaataacagacaaacagagagccaaatcatgagtgaaatcccattcacaattgcttcaaagagaataagatacctaagaatccaacttacaagggatgtgaaggacctcttcaagagaattacaaactactgctcaacaaaataaaagaggacacaaacaaatggaagaacattccatgctcatggttaggaagaatcaatatcgtgaaaatggccatactgcccaaggtaatttatagattcaatgccatccccatcaagctatcaatgactttcttcacagaattggaaaaaactactgtaaagttcatatggaaccaaaaaaagcccacactgccaagaccattctaagcaaaaagaacaaagctggaggcatcacgctacctgacttcaaactatactacaaggctacagtaaccaaaacagcatagtactggtaccaaaacagagatatagaccaatggaacagaatagaagcctcagaaataataccacatatctacaaccatctgatctttgacaaacctgagaaaaacaagcaatggggaaaggattccctattgaataaatggtgctgggaaaactggctagccatatgtagaaagctgaaactggatcccttcctcacaccttacacaaaaatcaattcaagatggattaaagacttaaacattagacctaaaaccataaaaaccctagaagaaaacctaggcattaccattcaggacatagtcatgggcatgtagtggcatgtgcctgtagccctagctacttgggaacctgaggcagaagatcccttgagcccaggagttcaagaatgctgtgtgctatgattgcatcactgcactccagcctgggctacagagtaagtccctgtctctagggagaatgacttacctgtaagacctgaaactataaaaattctacaagaaaacctagcaaaagctcatctagatattggcctgggagaataatttgttattaaaaccccaaaaacaaatgcaacaaaaacaaaagtagacatatgggacttaattgaatgaaaaagcttctgcacagcaaaagaaataatcaacagagtgaagagacaacctacagaatgggagaaaatacttgcaaagtatgcatatgacaaagaactaatatacagagcttatagggaactcaaacaactcaacaagaaaaaacaagacaaaaaaacccaaataaccctattaaaaagtgggcaaagcattatcctaagtgaactaatacaataacagaaaaccaaataccaggttctcacttatcagtgggagctagacattgagtacacatggacacaaagaaggaaacaatagacactggggccgacttgagggtggaaggtgggaggagtgtgaggatttaaaaactacctatcagatattatgctgattacctcagtgacaaaattatctgtacaccaaacccctgtgacacacagtctactcatggaacaaacctgtacatgtacctctggaacctaacatagaagttggaaaggaaaaaataaagtaggcaaaggacatgaacagacacttctcaaaagaagacaaacagccaacaaacatacgaaaaaatgctcatcaccactgatcatcagagaaatgcaaattaaaaccacaattagttaccatgtgacacccatcagaatggctgttactcagaagtcaacaacagatgttggggaggatgcagagaaaagggaagacttatatgctgttggtggaaatgtaaattagtgcaatctctaatggaaaacagtatggagatttctcaaagaactaaaaatagaactatcatttgatccagcaatcctactgctaggtatctacccaaaggaaaagagattgttatatcataaagatacctgcactcgtatgtttattgcagcactattcagcctgaacaacacagtgagaccctgtacacacacagacacacgcatacatacatacatatcatggaatactgctcagccataaaaaagaataaaattatggcttttgcagcaagatgaatggaactggaagccatagtctaagtgacataactgagaaacaaagtcaaaacactgcatgttctcacttataaatgggagctaaataatgtgtgtgcattgacctagagagtggaataatagacactggcaactccaaggggtaggagggtagaagggggatgaggaatgagaaattacccattgagtacaatgtacactatttgggtgatggttataccaaaagcccagacttcaccactatgcaatatatccatgtaacaaaaccgcacttgtatcccctaaatgtctaaaaatagaaaataaatgtaagagaatgcagtttcaaaccttgtgacaatgaaagcccaaaggaaatgtttagggtgcaaattataagtcatttctggtgctggccaggataaaaagcccaccaagtggatttctcccctgattgcgactaaaagttctggataaaattttgaaacgcagctgaggcctctgaaaagtaaatgaaacagattaagagggaagcaaaaacttgaactcctggtatagtgtaagttcctggttttctcttctttcaaccttggctgtgacatatgggcagccctagttgctgaactgtgtagtggttgtctgtggccacaacttcatggagaaacccccaatttcttgccagaggaccaggaagtggcacccttgcaagctggaaagtgtagggtgttgaatctcttctttttttcttcctcttgtcttttttctctttctgccttacggcgggggtggccctgcatgacaccatattgaggtcacagaggcagtgcaagcacctaaaactttgaaagaaaattgtctctgaacagaaaattaggaaaaggagaccccatggtctgcagagtgactggggccagtggagggtggtaatctctgttatttctttcttctggtcttcctgcccctgttgcacagaaatacagatagcagaatgtcaaagtctgagagagactcacttttctgggcagaggaaatgagaagacagactcctgtcctgatagctacatggttctgggcattggccaaatctcttagatgcctacaccaaaaagaatgaaatctgctctatatgaattcaaaattgagtaaccagaaaaaatatacatgtatcaacacaattcattcaggaaaaagaaagtttgcataacctaattatcattgaagatattagaacatgattaaaggtttaccatttaaaaaacatgtggaccagattgttatacaataagttgtctacatatcaggaagaaattaatccctatgttactatttcagactataaacgaagacagcttaatgttaatcacaaaacatgatacaagtattataaaggccaggcatggtggctcatgcctgtaatcccagcactttgggaggccaaggcgggcagatcacctgaggtcaggagttagagaccagcctggccaacgtggttaaaccccatctctactaaaaataaaaataaaaaattagctgattatggtggcgagtgcctgtaatcccagctacttgggaggctgaggcaggagaatcacttgaacctgggaggcagaggttgcagtgagctgagatcatgccactgcattccagcctgggcgacagagtgagactccgtctcaggaaaaaaaatatatatatatattataaagaacaaaaactgtaggccaaaatcacgtgattaaaaatatcagctaatctagcattgtgtcagtgaataagatgcaataactaagtaggctttattccaggaatggaaagatataccagtcagtgtcaggaaaattatcaatataattcatttttctaactacttaaagaataatgtcaaataatgtcaaattatcgtgctcaaaatccactttctaagcttcagcagatatccctaattaaacatcttattaactcaagattaagtaggaataagtggggatttcaaaaatataataaagactgcttaccaaaaacaaaaaacaaacccagaaactaatattgtcttaagtggcaaaactctcagatcatttcagctaaaatcaagaaataggcaaagatagctgctatcactattattattcagcattattttggagattgtaatgtagtaaagaaagaaagtatagtttgtttaaatagtaggaaaaaatacaattttatcatcactgctgattataaaattgtatgcctagaagacctgagacaggctgatgaaacaaagtactagaattaacaaaggcttgatccatggtaaatatacaaaaatcagtggttttcttctctgttaatgaaatgatatagaaatggaaataaggaaacacattgcattcacagttggtgtctacactttacctctgtgctgtgggaagctcctgtggggtactaaacccaagagaaacatgatgagggttgcattttgaaagaaagctttggcagctctgaggagagtagtttggagggttgatactggaagcacagaggccaattatgaggctcctgcaatgatccagacagagacaatgtggcctcaagccagtgacagggagaatgaagagaagggaaggatcagaaatatcaaatggagaaaacagaggattcatgattaactgattggaaaggaggggttatatgagtattcggctggcagatgattatatggtttggagctgagagtgaaggatgcattctgaaagacatttggatgtcttcagtgagtttgtttgatatgactagtgcagttgctggaccagtgtttatttccataggaaactgactctcaaattcctgatgtgtggaatgttttccttttagccctgcagatcagcatacgtcttcctttttctgttccatgtctcagaaggctgtgtctatggactgtatggaggctcctttcccctctggcttctgactgcctttgaccttgagtgaacatttaagcccctgccagactgtctcttctcaaagccataggtactctgcactttctgttaactgtgccctcaccttgtccctttcagcctaggggtatgaacagcactcttctggtgctccacttcaccttatccctgccagcacctttctaaatagtcttttcattaaattcctcctaatcactccatttgatatgctgtttcctgcttgctaaacttggtcagtgaattgactgcatcagaatcacctgggtgcctattaaaactacaggtctctgggcttcatcccagagctaccaaagcagaatttatagaggtgaaaccaaagactctgcaattgtacaacaggtgattctgatcggtagcaaggttggggggctattcctggttttcttggtgactctttagagacctcttaatatcatgagccagatggttgaggttaaggagctctgccatttgtcattatgtgacctccggcataattatttacctgtacaaaccttgagttccataaatgtaaagggagttgatagtttctatctcatgttgttgttcagcagcttaaatgaggtaatccatgtagaacagcaggatgctaataagcttccagtaagtgttatttattatctatgggtagaattcatttaatcttcacacactcaaattttgccagctttaggacaaataagacttggagtctgtaatcagtcttgtgaaggacacagagaagtaaaacaattaacaataaaatacagttagattctttggtatttataaacttctaatttatgaactttcactgatgtcaacaaagctgggtgacattacagatgtgcaccagctctgtcctccatctatggggtatggttagcagatgcatgtacagtgttgctttaaacatagaagcaaatggatttctgaacctaacttcatagagacatgttttcttatgagctgctttaggagtacagaagaggttgggaggagcagggcaggttacagagtcatttgtgaaatgtcaaagacatttcaagcttgtctgtccattggacaaggaggcagtggaagtgtttcaatcccagggaatagcatatggggttccctgtattgtgaaaacatgcagtgactgagaatgggcagtttggtatgaggagaacacaaagttagaagcacctgatgcacttttgggccattctttccttcaactaatatttgttgagcttctatgatgggccagacactgctcagggtgctggggacatggccaagtgcaaaatagtgtctgctctgatgacacttgcattctataggggtttgagtcaatgaagaaagatgtaaatgtctaatgtgaaatggtgataattgccgtggaaaagtcttataaagcaaggtaagaggaaaaacgtgtatggggtggggtatggggaaatgatatagagtccccagggaaggcctggttaacaaactaacatttaatcagagacctgaaggaaatacaggaagtagccaaggtgctatccagagagaaatcatcacaacagaggaaacacaaagaccttgaggcagagcatgcttgatgtgctgtagaaacagcgaggagcctgtgtggcttcagcagaaagaaaatgagaagagtggcataggagacaagatcagagaactgggtggggctgtagcttatgcaaagccagggagactattgtgagcagttttgcttttacttgtgagggagtaaggcatctttgggttttgatacgatttgatttaacatttacaaaagatcactctggctgctctgttgagaacagactgtcaggggaaaagcaggaagcagggatcccacttaggaagctgttggaattatccacaggagagtggtgacccagtatggcagtgtaggaggtgggcagatacttggtatgttttgaagatacagtagcatttttcaatgatggatcatgaggaataagaagcagttgactcaaggttttggcctgagcaattggaaggtcggttattaactgtcaaagaactgcaggaggaatagggttgttgtgtgataatggatatcaggaactctctttaagacattcttagttggagatgttgagccagtggctgagtggataagtctgaagttcaagggagaagtccaggccgcaggtatatatttggcaggcattggcactggcatatgaatggtatttaaagcctggagactgggcgagttatcctagggggagggaagagcagagctgcagtgactgaatactgcagcatccaatatttagaaatcagggaggtgagaaagaaacagtaaggagtcagagaaggagcaaccagtgtggtaggagggaagggaggtgagtcatgtcctagatgctaaaacaagaaagtgtttttagaaggagcgatggtggaatcaaatgttcttgctttgttaattacggcgcctgagaattgcccataggattcagcaatgtggagtcattggtgaccatgaagagctctctcagtggagtggtcaaggggaaaaagcctgttagaagtggttcacaagagagtgggtctggtggatttggagaacaagagcaagaacaacactttccaagttttttactctaaatggggttggggtagaaaaattgggtaggagctggaggggtatttggggtgaagggtatattttttaacatgggagatataaaaagatgtttatatgctgatggaatgatctcatcaagagggagaaattgaggacacgcggaaagagtgaacatgttgctggacagtttgacttaaaggagcatccacagtgacaagagaaaaggcagagtaagtgggttcagggacaagacaggtgagtggtagagttgatggtgggaggttaggaagccttttcagatggcttctctgttttcagacataatgagtttccattcagcagtgaggatggagagtagatgctacagaagggaccatgagtgattggagtaggagcaggtattggagacgcctggaatactaagatccccttgacttgctggctctgaatttcaagggagaccagttgacagggttgtggattattctgtgacctttttcagttaagtagctgtaggttttgagtagagagagctcagttcatggaagattggggttttgtcaggtgtagatgtctacaaaatgaaaaaggcatgtgcgagagaggaaagtattccatgtaagaagtttagctttattcccaaagccctgggagtcacctctaattgtctatgtgatttacagaaataggcatgatagcagtgaaaagggagagcactacacaccgttatgatagattatgggagctgattcatgattgcttccatttcagccactgtgacattggtgcttactttcaatttcatgggctattttaagtctggacctatcagtagacttgtacccttttgtccacaagcaaagaacaactttcatttccgcaagaggttgagggagtgccccccacctccctcctccccaaagtcttcaataaaccatgtcagcagtctgaaaggtttgtgactcccagagctaattttcaaacttttgtgcatcacagtgcacacatgttgtgccacgcctttggttcaactgggccagctattttcagatatgaaatatattttgtgagttagatatatatctaaaaagtacattttgtaaagcccaataaaattgcattttcagctagagaaatgtcaaatatcagaatgacctccaaggaccaaaacagcctggaacattgtgtattttattaagtagagagatctaaacaaaattcattgtgtggatacgtataaatgtctttacaccaaaataatctatcttgcagtttctttttgggataaccttcttatggctatttgtttatgccccaaggagcaacaagatgtcttgttttttttgttttcataatttgtgtaaataagaaaaaagaaattaaaaactgcttgttccattgagccatgttgggtttgttcagatgcatttcatacttgatgatacatttgtttctcagtgtaacaaatctggaaagacatgctgacaaggtttacaattaaactggatattaacttctttaatctgcaattgtcctaaatagattaaaacttcacagtaactttgtggaaacagtgtctctttccttgtgaaatgattgttttctgtttttctttgaaaactccattaaagcttatgtttgctgaccgagtatgattatttagtactgaacattgcatcggtctttctgtgtgggcactcattcttaattcagtttgatacatgagtttctgtggctgtaaacctagcatcaatatgcttaggtctcccaaaatactgccaaaaacacctttttcccctgcccacaaagccattcggagtggcctctacaacttgaactaaaatcaagttggatgatgctcttggatccttctagctcatcctatctcttgctctcgtttgatttctctctttttatcgtgtgtgtgtgtgtgtatgtgtgtgtgtgtgtgtgtatgtgtgtgtgtgtgtgtgtgtttcactgaatcagtagttgttaactgtcaccactgtgctggacactataagcaatgcaaagttgtggaaagatacagttctcacccccaagagctcacaattgtgggaatggtggacaaattgtgttatgttgtattaccatataggatagggaccttgttaaccagtacttccttggcacactgtattttctgttgacaaatatatatacttactgactgtaagattccttgttgagtaatcctatatgggtttgaaaaactaagcaaaaatatctccctacacaatgaaggtggaaagcttctcttttgcatttgctctgtagcttctgagtctggttgaatgccaacaaaatgaggtggctgcagtaatatgacatttaattacctgggaagaaagaagcttaataaatcataggccttatcacttagcataattattaccattaaggaaaataaggacctggatagagatcgtcagcacagcccagtcttggaagaagcccgaatgtgtgtattaagcatagaacgcgctgaaggtcacgcatcagtcacttcagccatacatgtgcatatctgcgagtataacactatcaacaatgacattgtcaaatatgcaggcagctggaggataaatatggaagtagtgtgaaaggtaaaagcgagaatggaagaataaatgacagtgagcacttatctctcaataagagaaatgatttcaaatgtaccctccttcaggccagctctgacaggtctctaatacaaaatcctacatataacacagccagcatctgagagtgagagcccctgtgctcagcctcctctgctagcaaagggatgaaggaaatagacatggcagccagtgttaaaagagcttagcttaaagggaggatcaagggaaatgtgacagacagtgagtgctgggtagagataacagctggatgatggatgtttagaaatgtgtgaagaattggtcaatgcaacaaatagaacggagagagggaaaaacactacaatttttagatccgcatgcacaaggatgctagtttagactaaagaagaaacagacaggcattctcactgacatggactagatggcatgaaggaagagaaatgtatacgtatgcattaatatacattttaattgtaaatcgacacagagtccaacaaatctttagtgcttgagcaaataagattgacaagactgatggcaaatctgtgctacataataggtttacccttgtcctaattattttttatggatcaccacccagaatacatataaaaaagaatggctttaacctttctctcaggctgattggagttttactatctatctttttactcttctcctttctaaatcaatgaaaaaaagtttgtataggaaacagtaaattgagccactctgacctttgatatttggataaagcaaaaatgtaagtgattgtctgtagacatcttattgatgagtctcccagaagagaaacataagccacctgattttctgattacttttcctgggcatctagtcctttatctcttaatattctgccattgagagcctgtatcttctcaattgtgttatgttttcagaaacagttaattcatgtacattccttgggtgaaatgtatcagcatctatattccactgagcatttatattgtaaaattatcttttttacccgctttatcctcatcctaataatgcggagaaaaatagacttctgagaaagtgatttttcccctgacagaagtaatggctatgttttcaagtatctcacacccgtacagtatgatctcttaccatgcctgccagttcagaccttcccaatgttagaatgttcaggtaggcttctaaatgatttaaattgactgtattttctgaaaagtcaggaatttgaagatggaaagatatttttatgtgtgtttttttcttctttactaaaagcaggtactgtacttcagagtatggttttatgagataattaaatcattatattctaataatgtattttagagaataaaccaagcaagttatagtaggaatgaactcaccctccccttcctcagttcccctctcagctctgtgatgccttcactgtagcattgtctagtgtgggaccacgaaaagctctttcatgttgctgacaattatctgcaattatcagtaatcacagaagaggcaattataacttatggaagcaccaacgtaattattacttttttttcaatgctctgagcttaaaggtactcttatagcttgatcataatgttgctgtggctttattagtcaaattatctagaatacacagactagatgttaagtcattttatttagttgtgaccagtaatagcaagttctaattttaaaagtttactgctttaggcaatttgtggttctcctttttaaaaaatggcagcatgttcttgaaggccataccacaaagcagatcatctttaggcagatctctgttattgtaagggctgtatacatagtcatgcatcagcatcccccaactcaaagatacgatcatccaatattgtatgtcacttgcaagcaaaggtacagccatttaacctcaataagtcatcaaaaagagtaacattatgctctatgtactttagaatggatgtagatatattgtactacattcattagaaaaatagccctagaagactttaattttctactagagagaaaaaatataagattgtcagccagacctgcattgaaattctggtataacttaggctcactcttaagcttttattatttagggtcttccttgttaacaatcaatataatttaagatgtccagtgcctgacaaaatgcctggaatatagaaggtgctcagtaaatggtagctcaccttatgtgttgaatgtagctggaagagatccccctaggtgggagggcagaaatttaacttaggcatttgtagagaaccacagacctcccaaagctccagaagggtgttgaacactgagggtgcaattgagaaagcaagccagtgctacctctcagttgagtttctctcattcccacaaggcttgcttgtcagtataaatcaggctgctcctcagtccccaataactgttgactttttttccctcctgctgctgatacttaagtgcatttccatgactcctgcctcttaaatctagccctatcatgcaaagctaccatcttaagcccttggtttccacattctcttttaggagctcatacttttcttcttttcacaagtatttattgaatgcatgctgtgtactcttccctggtgcctgacgctggggaaattgagataaagaagacacagctgtgcattccaggaacatgcatcttagtttggatatctcagaaagacctggtggtacttaatcatgcttgaaacaaacttcctatgctttcttcaggaggtcagaggtgctcagcatgatggttgtgtagtagggtgtgaaaagcttattccgaggtgtgtattatgcagtcagggctgagaagggtgactggggctcgtatgttgctaggtaattcccctttactcccagtttaacacaataaacatttgttgatagcatagaaagtattaagcaggcactgtgctaaattcttgaaacacagagctgaataacaatctctgtaattttataactttttggcattggggtacagggaaatactggaagaagaaatgagataaaagaggttattattcagtttatcaaaatacaaatattggccccataactaacaggatgtagatttaatgtgaagggatatcgcctttgttacttcctatcacaggttcttgctttgcagataatgctttttctgtcttacctatcaaaagagccctctcttggcttatctgtctgtcatcctcccacttgttaagtaacatgggacctcaatcatataggaaacccattctgtgtattttgttgcagtcaagtgccccccatctacagtggtaggcatatgacttatgcctggtttttcaaagaatgctatccctttggccacagtgattacttttgaggtagacacaaggcacaagctgggcaaattagaaatctttataggactttttgtcaaaactattgaaagataattacccctttttcctggggtttctaagtcagtaaagagtgagtctgagcctgctgttggatgtcttatttgcctgttggagagaaagagaaaaatagaacctgaatgacattgttcaaggtcccagattcaatcgtgactgaagacaacatttccagttacatgtgtgaatcagcaccctcctcccccagcccattctggaagtagtaggtatgagttgatttagaggtggctgagttgcaaccaaaattatctcttacaaactcacccattcaaaagcaaagacattaccaaaaaatgctggtcgatcttgtaataatctccacctctccaggtcatattgcctttggaagccacctaatgtgtgtgtgattgcttctgatcttttatatgacagttcacatcctcctgatgggcagcaccagcagactgcatgggccgttgtggtttttctaataatcccatgttctgtcagcacttggatgatacattatctgggattctgacaggttgccctcatggatgtgatatacttcccttccattgttgttttaagcatttctcagtcacttatgtaccaagaactattgttagaactattgtatcgtaacctttaaaccaatctccagctgtatgggagatggtacttttactatccccattttataaatgaggaaattgaggtatagagcagtaaaataattttcccggttaagcaggtaagtgctacaactgtgattgacctttgaacctgaccccagagcactgatgtaatctgtctgtacccaaaatggtttcagtttatctttattcaggcgcagttcaaagaatcttatcctttgctttttaactactctattctccctggtgactaggatatcttataccccctttgagctaggaactcagaaatgaaaatgatttcttccccactgattatttgtagggagggctacttacccctagaaggagaataagagtcagccaaaaaaggaagattctccattttcttagaactgttttggaatatggaacttgtagaaatagcacctctgcacaaatcctgttagaaaatcaatagatttgtctgaaatagaaaactatcagctgggcacggtggctcacgcctgtaatcccagcactttgggaggccgaggcgggtggattgcctaagctcaggagttcgagaccagcctgggcaacacagtgaaaccccatctctactaaaatacagaagattagtcaggtatagtggtgtgggcctgtagtcccaggtactcgggaggctgaggcaggagaattgcttaaacccaggaggcggaggttgcagtgagccaagatcgcaccactgcactccatccagcctgggtgacagagtgagactccatctccaaaaaaaaaaaaagaaagaaagaaaaatataaacaacagcaaagagtcacaagttagatttaaggaaaagtggagtcaacaggaaaagattattggaaacaacatttacagtctaagaaaggagaaatagaaacttctgggcccttttaaggactagtctgccctgctgtacccaggatagcaatctatattcccagagctcctaggtttccctgcactgagcaactatatccatttcatatgaacattgtaaacattatacaacttctgtccaaaaaagttatacaaaattgagatatcatcacaatagccaatgccagcacaaatgaaacaactagcaaactattgtaaagcagtttttagatagtacataatactaggatataaactgtataagtaatacttgcaaagcagagggcaataactaataagtgtgtgatacaggtaaggaaaggttgaagaagtcagtggcaaaataaaagatccaacaggaggtggctctggagatgtgagttgctatgcatttgagattttctgcagggctccctagagagttctctcagcaaattcacaggccccagtgagaatggggaatttgggaaggccactggaaatcacagttctcatatatatctccatggcttaccctttaggagagcaggaatttggaactgctagtcctctcttaggagagtgcccagagaagaattcatcatttaaatagcttcaggggtcagcagatcatgggattgaaggctgcagagagggctggggactggagtctaccagagtccaagtcttgagtgaaggcattcaaagtaccatgccagttaaacacagcctcctgtgggcagaatttgggatttgccagttggtgatgccgcgcaagagtgagtaaaaagggatggaggtttcatataccagaatatgaaggatgggaaaggttgggattgaaaaaggaatttgtcagtgaggaaggtacctggggtaggggtggcctaagataaactgtggtccctcaacagacccctccagtcacctttagtgaggacagcttgagtatgtcaggctctggggcttatgagttgtccctgtactatcttgctactctgatctgatgtaagcaactgtattagtccattctcgcattgctataaataaatacctgaaactgggtaatttataagaaaagaggtttaattggctcacagttccacaggctgtatgggaagcacggctgaggaagcttcaggaaactttcaatcgtggcagaaggtgaagtggaagcagacgcatcttacgtggctggagccaggaggaagaaagagaaggaggaggtgctaaaaacttttaaacattgggaggctgaggcgggcggatcacgagatcaggagatcgagaccatcctggctaacacagtgaaaccccatctctactgaaaatacaaaaaaaaaaaaaaaaaaaaattagctgggcgtggtggcgggcgcctatagtcccagctactcgggaggctgaggcaggagaatggcgtgaacccaggaggtggagcttgcagtgagccgagatcacgccaccgcactgcagcctgggcgacagagtgagactccgtctcaaaacaaacaaacaaacaaacaaacaaacaaacaaaacttttaaacagccagatcatgagaattcactatcaggagaacagcaaaggggaagtttgttcgcatgatccaatcacctcccaccaggaccttcctccaacattgggaattacaatttgacatgagatttggacagggacacaaatccaaagcatgtcagcaactaacccgtcctaagtacagatgtcctttcctcagtgcacaaaaagactattttactaacgctgttttcccaatgttaagttttttctctcacaagctggtcttaatctttgttattaaccaccacttgtccatgctacaatttagttcaaggtaggcatctaatattacctataattgtctctatttaattattttatgttgactaaattagcatttcatgtgcgaagagcataatgattcacagatggtatacaacctaaataattggtgaaccactttaaataccttatagataaaaagagaatgaataatctttgagaatttgttagccttcctcatcctgtggcagtgaagagagtaatggaatgagaatgtctgacttacagatagtgctcaataaatatttgctgtgaatgaatggaagtgggaatatgaaaggcctgtgggaccccttttggccttctccagagcctgctgtaaagctgatctgaaaatgggaataataacagctttcttccaaaactgctttaaggaggaattgagaggaagcattttgtaaacatatggcactatataaatgttcaaaatttctattgtggtccctcagcccatcttagggaacttcatggttaacccattagagagttgtatggaaacttaaaaaatcattttaaatgccttgtgatggggagggttgctgatctcatgtactttatacagcagaggctacaaatttgaagtttggcaataggtgtgtttgcctgacctccccaatgctttaaaagttttatgcaaattatataccagtatttaataataaaaatttcgcttaaaatatgcattttagctgtttgttagaaaatcaggttttctagaaacttttgacctgaattcccacaaagaaataataggctgggatggaatagtgatggctccctgtagaacactattcctttttggttagcaatgattcccactactgcccattttcccccaaaactgagggcaagtgtcatttgctgttgatagtcaagctttgttttccctccttttggcctctctgctcatttgcattacctgtctagtccccagtagacaatagagtttgtgaactctgccaaggggctctgtcaccactacatccacccctccccatattctcccaaccccaactgtctacttgattgaaatacttgccttaggggcattttcttattttctctctggaacaaccaaattatttcctttttaaagcagaaagagtcagctttaaagactgctctgtgtttgatttggtctttaatgtgtataggaagatgtacatattttatggtttgttgattgttggtttttctttgggagggtaggtggctgttttgggaagcatcctctttaacagggtagttataagtttacagcttaagatgtactctgttggcctttgcaatccccacagcttttcctgcatcctctaacttttaatatgtcttgatcaatgtattcaaacaccatttcctttaaaatgttttcaactctattcatctttattgggtttttaaaatattttatttctaaaatttctcaaatctcttttaggctagttgcatttgggatgggctggtgatttaatttgtatgggttctggttttgcaagagaaaaatcaaatgactagtgcatgtctgaaatgcatcaactatgtagtatttattttgccaagacaatttactaggctgtgagaaaaataaagatgatccctgccctcaaattgttcccagtttagtgaaaaagatacacatatgacataactgtaagaaaaaaaaaaaatataagtattcagtaatactaaaagtaacttacctttgtatggctctcagtagtgcacaaaacatctttcacatgcgttacttgatataagcaagagctttgcagaagaggaatcattaaaactgactggaagattgggaaaagcgtcacagagaaaatgatacttaaacttggctttgaagaatagtctatagcctgaacaatggagaaaagggttagaggtcacatttcaagccaaaagaatgacatgagcaatgtcaaagaggcacaaaagggcaaggtatgtttgagtgtggctagtagattagtatgaattgatcttagaaataaggggacagtgttttagtaatattattgcaaaaatgagtgggactaagtaatggacaactcagaatgccatgctaaggatttaaggactaaaatggaaaactcagtatttctaacaacagtctgattttatttttctttgttgtggtttcataaaaatatcatttattgagtatctggcatgaccttattttaatgcaagctgatatatgttcaaattattcagaatttgttcaactgtaagtgtcataaaagtaactcagtctattttatgcaatcataaaatagatatttattggctcacaaaactgaaaaagccaacagagctcagccatggctgaattcaggactcactccatgtcatgaatcccatctcctaggtctgttttgtctttctttgctttactttctggtgctatctctgcatatggcagtccccagccacaaattcaatagaaaaatgtctctttcctggaagttccgccaaagtcttcaaagttaaggaaacattctgattgtattcactggcccaattaatattcatgcctgggagtattagataggtgctccaaaaacaatatagatcctatttccaaatgaggaggagtggatgcagagttgaaaggtgaaaaaaaaaatgttctttatagtgctccagtttcctttcttagaaaagtctaactactgattgattgattgatttacttatttagggttggaggtgcagatttcattgacaatcagaaagggcaagtttgatttgtcttttcatcctaaaagtagcaacaagtgtttgcaaaaggctggctctttgttcagtgcagatttgtatatgtccctcttgtgttttacaaaataaatgggcacctttaatgtcatcacaatgggaaatgatttaactacaatcacattgtgtctgttgaattttccactaaatgatctatatgccattgtgaagccccatgcaaacctttattccactgtagattttgtgttgcgtagtgttgagaaatatttttaatggtcttttaccccctttactttaaagcttgctatagaagcttgaatgtaggaaaattcctcttcagccagaactgtagagttgctagggccccaccattgtaactgacagcagaggttcagcaaagttagttctgaggtttgcattatcaaatctacccagattttccaatctacaaaacatctattcacgtacatttaaaaaaaaaacaaaaacaaaaacaagaggtttccaaatttgtcaattgacctgctagacaaggcataatatgttgcctaaaataataccataaaccgtgaaaaaagtggatttgtcaaatcacctacagtttttaatggttttcgccttcatatgaacatttcaatttcaattgctgtgagttcctctaaataagaatcgatctttcttccccttcccattcccatcattctgagtgatttccagggaagtaaccaaattaaattaatctctgcagctttaaggttgtatttatttatttattcttttctaatttggtgaatatattgcactgacatcccttttttaaacagttcaattttcttctaccgttctagatgagttgtcaatgataagcaaagtaatatttgaattccaggaggttctttgtgaagaaaaatataatatcccagactgtcacagtcagtttactttttaaatgacaacagtgttgttataccttttaacttgaatttcctgagaaacttcaagctgtaatagcattaaacttagtagtaaagtaaccacattcacaatttctttgcttggaggaaatgcattctcgctacttaatattgtgagtcattagcacttttagctgttgagccaagctcttgataggaactttgtgaataattgtttaactaataaatagtactcttttgccccagcattttgagggggtagagaggtactgggcattgggttcctagtagagccaggctgtaatacctaaatctgaccaacaggtgccactctccaacagatgatgccccctttgctcactgactgtgaccatgccaagtttacactgcataaccctgggggagggtgttgccttcacttgattgatgatatgagtggctcctcctggaattgtgttgccaaacccttttctcaaagttcaagattgagttatgtaaatgaaattataaacctacttcatggacagtaatgggacattacaaaagaaacctctataaaacatgtgtagttccctttctgtttttaaaaattattgtggtcccgaacaattaaatgaaatacctccttgtttctcagagtgtgatctgtatcagaatcacttgagatgcttgtcagtgaaggttcctggaccctacactgagcctacttaggcagattgtgtgtgtatttgtgtgtgtgtgtgtgcatgcatgtgtgcgtgtttgtgtgtatgtgtgtgtgtgtggtgggggggttgatcaccaagcttctcagagatttttttgtaatgtaaatttgagaacaactgttttaaaagattactgatgattctaaagtattagcctagcacacatttggaaaagtggcttttccattaaagtgagggggtacaaaaaggaaagagagtgtatgtgagtctgaactactctagtgtgcacagataactttcaccctcaatattatcatctttaaatatcaaaagtgtgcacagataactctcaccctcaatattgtatttaaatagcaatagcaatattctttactattattaaaatctgttgtacgttaacaattacaatgttatgctttagagtacaatcatgctttattacacagacatcacccttccatcaacatttataatctaagacaatagtcagtgttggatatttaggacacatgtgaaggacaaaaatcaaataaacacttaaattatgtgtaaatgttgagacaacttaaagctcttaatgatgtaaaattttcattgaaaaataataaactaatcataatctagactccaccatacaaaaggaatgaagcaaggggtattatgtgtgtgatgctacattttgagttttagggaagtagtgtccaggattttagcaaatcatatacatctacacttcagaagtagaaccatttcagaaacagaacatgtgtggatgtgttcattcctgcccacagagtcaaagcctgtttcatgaagacacatataatttctgtttctcggggaagtggtttatgaaaccctcaagctattttgttgcatttctgctgccagccagtcaggcccgccccagtttcctggcccacctgtaccttgtctggcctgtgagtttaatcaacttagatgtggcaactcttttggctgtgagtcagaccttgaaagttaaataatattaaattttggagagttggccacatccattcacataagaacttttaaggctttaatgtaattatttggcacttatgggatataaacacacacacagacacacatttgactagacacatgatctttttgcctcttcagaatgatcaactcaggatcacccaagaaagtgatacatttcttttaccaggcaattactgaaccttaagggaagaaggctaatattcttggtatattttttatcatcctcttgcctcccaagtggcaaatgactgtcaatatttagactagagtgttattaagaatatgaaatgttattatagagcaaattttgtgagaaatttgacccatcacttcagtatgataccagactctcaatcatgttgtaacattaaagttccatttttagtgttgcctaggcctggaattatgttcaaagttaaaggataaaatcagtgttgagaaaacgcattcatccttttcatatctccacctctgtcatactccgcctacccttttgactgctcatgggaattcggttgaaaataaaagacagtgcatgttgattcagctcttgctgtgtgcccaaaactccccatatttgatgataatggaaataagcaccccctctgctgctcaaactaagaaaaattaatacaaagaagcagcagttatgcaagtgacatggaggtgagactgtaaaatgacacgaaggtgtctttatcttctcagacatggagaaatcatgggtaatttgaaatgacattaacaacttaaggcttattattagttgtgaaaatggtcacttcctagatgaccaaaaaagaaacaaaacaaaaaagaaacttgtgagaaaaggctgctttagtcttttgactcattacttttttttctctatttttttcttatactttaagctctagggtacatgtgcacaacgtgcagttgtgttacatatgtatacatgtgccatgttgatgtgctgcacccattaacttgtcatttacattaggtatatctcctaatgctatccctcccccgaccccacgacaggccctggtgtatgatgttccccatcctgtgtccaagtgttctcatcgttcaattcccacctttaagaaaagggagcccggcacagtggctcacacctgtagtcccagctactcatgaggctgaggcaggaagatcccttgatcccaggagttcaaggctgcagtgagctatgatggcaccactgcaccccagcatggttgacagagcgagaccctgtctcaaaaaaaaaaaaaaaaaaaaggagattatactatctaggggtttgctcaaccaaacagtcatcaccttccctttgaaacaaataatatctggccttaaagagtaccaccctccctcagggtactggggattggttccaggagccctgtgtgtactaaaacccacacatactcaagccttgcagtcatctgtgcagaacccatgtatagaaaaagtcggcatcactcttcatagccacaggtttcacatccctcaaatactgtgtttttcacctgtgttgggttgaaaacaaatctgcatataaatggagcagtttgactcaaggatcagttgtactactttcataagtttaggttgtttttcacttgttttggggtctaggtctctatactacagctaatatacaattaactttaattattattgatatcatagttcagcatttgaatcccaattaagtctgagatcttgaacaaattacctagcctttctgagcctcaggggttttttccatgtacaaaataagaataatagggagtgagatgaggtcataccatgcttggtatcaggctcggtacatcataaaccctcaattgggctttgtggtagatattgtcgtgttaaacttacaaggagtttctaatctagtaattaatatgggacatatatacaggtgattataatttaatacatggtaaagttcagaggagggagagatcactctaacgcagaggaggctgtgtcatttcacctgagctttgaataaaatgagtaatatttaaacaagtcggggagactttctaggtggaggaaattgtacaagcagaactggaaagatgggaaggcacaaggtatcaatgaggtgctcagtgtgactgcgttgtagaattcatggaatgcagtgacataagccaagaccgggaaaaatgaagttggttgtagctagactgattatgtaagacacagaatgtcttatgttccaaagtttggtctctaagccatggaaaatagattttcactctactaatttggaagggtgcataacctgtttatttatgaccaccataccctcccatgagtgacagtactactgccagacagcttcatgatggcagacagtatgtgccagtgatccagtggttgaaggttcctgatcagctgtggacttctccatcacccagccagtcacactttccaccacaccaatgtaatcatctagtatgagaagccattatgtttgaggctaagttaaaagctaacatgttctaaattggctgtggctgattattttgtaaatagtgtcagcctagaaaactaacagtggaatgtgactctagtgcctgtcagccaacgctggtcatggtatcaaatacacatgactcttcatgcctcaagtcatttactaggtactttttttaatccatttatggtttgataaactcagactaaaaggttgtgtaactttttctagttctcataaacactgttgacatagtaggaagatcaatctatcccagtttcccttctccccgtggaaaattgggaattagcaccaatacttgcaagacagagactgtcagaagggaatgggctccttcaaaatggctcatagttttacccaaattagaattcatgagatgttttacttactagggaccagagccaggtaggagttctaagctcttaagtactcaagcataggaaagtgattaagttattaggtttcataaataagatatcaaaaactaaagataacaatgcaaaaccattggttagcaggtagatataaccaaaagtagataaggagttaggagtttaggaaaaacaggctgctgaccttcaaagctggagcctggtctctttcatgtcagtgcctcctgatccatactgctagtgtatagggaccagtgttctgttagcaattaaccgagacaatgaatgtgactgcaggtatgggtactaagttctgttagagactagagcaataagcaagagagctaacttttactaaaaggttcattgtagggatgataatcagactgggatgataatggatgatattatgtccagggcaccaaggaatatccaaattctgttctggggcctgaggaagatattttagcaactagaaaatgggaggcatagtaatgcatcacttttggttgtggcttccccacaaatcctgatgtggagagttctagtaattaagtgaattcacaaaaagcattctgcttttctaagctggtggacatattagaattacatcgggtatagttacagaaaacccaattaaacagtggcttaaacgtcttacgagatatgaagcccagagtatgtaatgcgtgactgactcacaaatgtacagtatcttcagtgtcacaggctccttctgtctttctcctctgccttccttagcatgtggcttttacattcccatggtttcagttcgactcatcatatttgcatgtcaagtcagaagagaggggtgagacccaagagccaaaggtgactttcagaagagtctgcctgctttccaaacggttttcatagaagccaacctaacaacttcacttcagtctctcagaccagaacttaatcatatggctagttgcaaaggagcctgggatgtgtagtttccatgatactgccctgaaaaaaaaaaaaaaaaagagctctgcccataagaaaggagacaatagatactaaagaagccagcagcaccaattcccaatgtgagttaagtctgaataacagcagaacaaagtcagccctgagacttactgagcctgtgctcttgcttacgaaaacccaatctcagattccatcgtgatgccatcttattccaactagtgccagatacagaagaagttggaaccagaaacagaaagaggaagcacatgtatgcctttgtataagttttctgtgcctaccttatcaagttatcacaaattgggtagcttaaagcaacagaaatgaattacctcacagttctggaggccagaagtccaaagtcaatgtctggccagatcatcctaaaacttttagaaatagcaagtcaaagccacatcccccagtcacaccagctgtaagagaatgattaacagccaggcctgctgtgcttgtggctggaccttctagggctatgctgtctctggaggctctaggggagaatctgtcccttgcctcttctagttccagcagctgttggccttccttggcttatggccatgtgtctctgctctgtcttcactttgtcttctcttctatatgtttgtgttttctcttccttagtctgtctcaaacctctctatgtctttctcccatagagacacttgtcattggatttggggcccaccaggacaatccgggatggtctcatcatctgaaggtctttgacttcattgtatcagcaaagacactttttctaagtaaaggcacacttgcaggctacagggattaagacatgggcataacttttgggggccacttctcaacccactacatcctctgctaagcattgagttttgccaggtcacccccaaccttttagaaatagcaagtcaaagacacataccccagactgtctcaccatctgtgagagaatgattgacagctgggtctccttgacttgtggcaggcccttattggcttgttttgaggattagatggaccttgcactttatgtatttattaaagagaatctatccattattactgtgttgtttttctccgggcttctttatgatgcctggtctaggagaggaagtcacagagaggagttggatgtgttgctgtgggctgaagaaagtagtgcaaaagtggtttgtaggtgttggccttttcttcccactcaactgtggtttcaggatataggtgatagtgaatatgaatttcataatatgctgacaggaaaagagggaagagtaagggaataggggattcctgatttaaacaaagcaggaaataggaatagggcaaggaagtcatgtgacacaggctattactagggggcggttaatctacaaaactattacaaaatttagcctttgagataccccaaaaagaggttaaataagcaggtttgaggtatgacccctactcaatatggctgatttgtaaaatgagtgttgttgtgcccctcagactctacaaaatcacctctgcaaccgttttgtgatgggattaatttttcttttagttctgctttgagtgtttattttaactggatttcgcctgggcagaaaaagaggtggtggttctaacagaggattgacagagaaaatgcgagatggaggaagagcccaaggagggagatggaggcagagttgtaatcccttctcctgactccaggtggcgcttggtttctcaccaaggtttagcctcaaaacactttctcaatttccttagaaaggatgaaaggcagcgtaatcctgaaacaagtggccacctatctgtggattctttatgctttcaggatgcatttcagcctcatttgaagttttctagagggtcagaagggcttggcgggatgaaccttagaagtgctcttacccgtgaaaagggatccctgagcactgttcaactcttcgtgaatgtttgttaagtgaatggatgactctaatgcctttccattaaaggacctgccctattaaagaccgattcccagccccagaaataatcacttaagtttcttaatttctcttcataatgcactactggtaggagagctcattttctagtattacaccaaactgcagtgcatgatacatttcctttcacttgcaagaaagccctacagacggcattaatggatttattttaaattgctgtttgtgaactccaaataattatataaaattgttttttaatgttcgcataattttttcatcattaaaagccaccaagctctttaatactgaagcagaatcaaccattgaacataaaaaatggttaccttgatgtgtctaatatctctgcctcacacacacagacattctttgctctgcatggttatttatagtgcttgtcacattagtggctttttctggcaaatgtattgttttggcgtgaacttccataaggggggagaaatccttatcctgaaatttcctggaagctaagcctaggtacttggcctgccatagagaattgggcaaaggtactattctcattttatcgtttgagagaaccttgctacacttagccattcctcccattttcaaaatcgttctctgcataggccataattcagtgctgcaaaagcctgcaaaatctacttattaggatcaaggtgtggtttcaagatgttttcttcaaaattatagcggtggctgaggagttcaacagatgtttgctttgaatttaattttacatttttattcattgaaaaatgtaatgaaaatgtgctcttcaatatattccaggtttgtatccactggagactattagtgctttaacttgccctgacttttacacagttattagaaaaaagattttcctgtcatttctatttcattaacacctaacctaagattgtaagacaggctggcaaataattgtaaatgatttttttttgtctatgtgaattaggacattcatcagggaaacaacatgcagaaataaactagtaatgctaataatatgcatttgtctaacataacccatgatttcaaatttcgtattcatcaaaacagtctcactgatcttatgaattgattggttttaataataaaaagatgttacaagttcaaatttctatttatatattgaacctaaaagattgcttctctctgttataatagagtccctggaagatatagttttaaaatagtctcctaataaatacactaacaaacagttaaaaatgtaatcttactacagaaagtgaggtctgtacaccagcagtttggaagcttgttagaaatatacaagcttggcccccaccctagccctgctgaatcagaatctgcatctttttttttttttttttttttgagacggagtctcgctctgttgcccaggcttgagtgcagtggcgcaatctccgctcactgcaagctccgccccccaacgggttcgtgccattctcctgcctcagcctcccgagtagctgggactacaggcgcctgccaccacgcccggctaatatttttgtatttttagtagagacagggtttcaccgtgttagccaggatggtctcgatctcctgacctcgtcatccgcctgccttggcttcccaaagtgctgggattacaggcatgagccaccgcgcccggcccagaatctgcattttaacaggatctcaggtaatctgtatgcatattaaagtttgagaagcactgctcggcagtaaacaatagaagtctctgctaatatacttgcagtctacgggactaacccatcatcatatgtggtcacatatggtgaaggtgctttccaaatgccactcagagggctgatgtccaagctggagagattgccaggccacatccacaaaatgatgtaacaggtctcttggagatgagacattttaaaaatttttttaattatttattttttagttgacaaaatttgtatatatatgtggtatacagtatgatgttttgaaatatatacacattgtggaatggctaaatcaagctaattaacatatgtattacatcacagacttatttcctgtggtaagaacaaataaaatctatccgagtttatatatattttagaaggcttcccaggcaattgttatgaacatctagttttgtggaaagcaagacattgagagaataaaacaagacattgggatataaaactgacagtttctaaagcttggatgaagagagaataggtaaagggaaggttcacactgaatagaacagctcatgctagattggcttgcaaacacccagtcctagtcaggggccatatgaagacaagagaaaatggaaatgacagaaaaaagtgactagagaggcattccccccattccacatctaccgggtggctgttccacacagaccaccatgccaggcattgctggacaacgaggtgagtacccagatcctctgtcctcttacaccctgtaatgtactagaggagaccagaatgtcaacaactctaatccaagcaagaactaaatacatataaatataaggtaaaataattgtattctgatcatagatgaaggaacaattgattatttatttatttaagacagagtttccctctgtcgcccaggctggagtgcagtggtgcaatctcagctcactgcaatctctgcctcctgggttcaagcgattcttctacctcagcttcctgagaagctgggactacaggcacctgccaccacgcccagctaatttttgtatttttagtagagacggtgtttcaatatggtaaccgggctggccttgaactcctgacctcaggtaatctgcctgtctcagccttccaaagtgctgggattacaggcgtgagccactgcgcctggcaggaacaactgattttgattaaaagaatcaagaatggcttcacagaaaggaacccatgtctctatgtcctaggcatggttctaatcacatttgagaacaactgatgtggaaagaaaagatggaagaggagattcaagaacaagtgcatgccgggcgcagtggctcacgcctataatcccagcactttgggaggccaaggcgggtggattaccttaggtcaggagtttgaggcaagcctgaccaacatggagaaaccccgtctctactaaaaatacaaaatgagctgggtgtagtggcgcatgcctgtaatcccagctactcgggaggctgaggcaggagaatcacttgaacccgggaggcagaggttgcagtgagccaagatcgcgccattgccctccagcctgggcaacaagagtgaaactctgctgtctcaaaaaaaaaaaaaaaaaaaaaaaaaggcaaaactcaggggcgtgtatcctggggagcagatcaacatcttcatgtatgtggggggaccgtacagatcactgtctactctgatgtgggaagagaagaggcatgtggttaaagatggcataaaagggcactttgttgtgccggcatagaggaccatgaagccatattaaggacagtcttctgtagatgttggctacccctgacaactctgttgattctcttgaggactaagaagttggggaagtgagcatctttaatttttttcattactcaagggaagagatccttgaagctcttggccttcaacttggtaatcttggagtctatggccaagatttataaattatttgtgctttatccacactgactttttagcagcctccagttttccacattttttctctagccctggctgactgtgttctccttgaacacatagacatatgaaactattctgaaagcctacatatgttctagaaatgtaaaacagtattgaataatatctgcttcactgaagctgcagatccactctctgagataggcaggagaggtattattaccatgtaactttggcttgaggaggttacatgacgttgtggacatgtggctaataagtcttggagctggaaataggtcaggttaattgtccttgccacaattttttcacttcctcttattctttacagtaagtcactgttgtaatcattagctctaggtaacaatatttgctccttctctccctctgtgcctgtagaagactgaactttctgttcagtctggttgggtggttctggcaaatgagatatgatgtgtgtcacactcaggctggagcagtcaattaccaatttgagaccaagtaccccctttctctatttgtgttcattatggaagcccatgttaggatgagcctctggcagtctaagtcctcaagtgactatgataaattgagcctctatactggacatgtagtgtcagcaggaagtaaacttgtgttaagtcgtacagatgtgggggttgttcattactgcagcagaacctagcctattctgacagataatagcctccatcaaatttccatctagataagccagcatgtattcactggagagtgcagggggtgtaaagtgaacttggtggggagataaagcatatatggaaaatacttcatagcacaagacactatactgtctgaggaaaggttctgtgttttgactgtcctctaggtctatctaccatttctatgatatatgtcacacctaataggtgccatgtaggtatttgttgggtgaatgagtaaacatatacttttattttaatgtgaactctgtgtattctttccatcaagatatatcttggcaatatcattttttgtaatcatttctattaattttcatattttctgtgctatacaccataagccatgaaaattctaggtgtgaacactgaccttttccaggaatttagtttgggtaaagtatatctgcattattattaaacagctagcgtcatagattttagaggaagaagaaaggggtgcagtcgtgacattattagaaattcagagcagtgatttcgcattctgatttggtgatatgcctggagctatccacatacctctagcagtgttgcgaggtagtaaatgctacaggcataacatgccaacaagcagatcttaaataaaatatattcgtgtatattaactttcttattttatatttcattgcaaacacaatctcattcttctctatattttttataccataataatggacctgtcttcaagggaacagcatctcgttgtataaacaggacccttaagctgagactgttcctgtgacttggcggtcattgaaaagattaaatgggttgcaaaacaccgtctttaaaagtgaaggtaaatttgtctcagctggaatcagaagccagctgggcctaagaatgatgtctatgtctacatagcatatcctgatataacacatgccttgccttgtttcagttcgttaattatctgcttcctgttcttctgtttaattagtcctgtgttgtttcattctttccacttcctgactttcttcctttctttcatattctccatctgtttctgcctttgaaaatttcattttggtttttaagtttaattgatgtctcctctgacatctcagatttcattagcatttcttactagatttgttacattcagtttagccatttttacatgtctgaaaacttctaaatccctgatcaagtgtattcatcctcaaaatggcatcttttttaaaaaaagtaaataaatgttctcaaatgctgttcttttttttttttctttccccccacccccccccgcaacttaagttattttagattccaggggtacatgtgcaggtatgttacattggtaaattttgtgtcgctggggtttggtgtacaaatgactttgttacccaggtagtgagcatagtgccctataggtaacctccccctcctcccacactcccctgtcaagtcggccctggtgtctattattccaatctttgtatccatgtgtactcaacgtttagctcccacttataagtgagaacatgaggcatttggttttctattcctgcattaattcgcttaggttaatgacctgaagctgcattcatgttactgcaaagaacattatttcattttttatggctgcatagtattctatgatgtgtatgtaccacattttctttatccagtccaccgttgattggcatctaggttgattccttgtctttgctattgtgaatagtgctgtgatgcacatataggtgcatgtgtatttttggtagaatgatttatattcttttggatacacacccaacaatgggattgctgggtccaatggtagttctgtttataagttctttcagaaatctccagattgctttctacagtggctgaactaatttacattcccaccagcagtgtgtaagtgttcccttttctctgcaatgtcgccaacatctgttattttttgactttttagtaatagccattctgactagtgtgagttggtatctcattgttttgatttacatttctttaatgattagtggtgttgaacattttttcatatgcttgttggctatgtatatcttcttttgagaagtgtgtgttcatgtcctctgcccatttttttaatggggtcatttgggtttttttttggcttgtaaatttgcttaagttccttataaactctggatatgacacttctgtcagatgcgtagtttgcagcattttctcccattctgtaggttttctgtttgctctgttgattgtttcttctgctgtgcagaagatctttaattaggtcccacttgtctgtttttgtttttgttgcaattgcttttggagactttgtcatgaaatctttgccaaggcctatgtccagaatggtgttttctaggttttcttctagggtttttatagtttgaggttttatatttatgcttttactctatcttgagttgatttttgtatgtggtgaaagaaagtgttccagtttcaatctttggtatatggctatccatttaccccagcaccatttattgaatagggagtcctttctccattgcttgttattgttgactttgtcgaagattagatggttgcaggtatgcagctttatttctgggttcgctaacatgttccattggtctctgtgtctgtttttatgccagtaccatgctattttgatttctgtagccttgtagtatagtttgaagtcaggtagtgtgatgccttcagctttgttctttttgctcaggattgctttatctacttaggccattatgggttattattttgttccatatgaagtttagaatattttttctaattctgtgaaaaatgacattggtagtttgataggaatatcattgaatccataaattgccttgggcagtatggccattttaatatatagattattcctatccatgagcatggaatgtttttccatttgtttgtgttgtctctgatttctttcagcagtgttttgtcattcttattatagagatctttgatcttcctggttagctatattcctaagtattttattgttttaatgaccgttgtgagtgggattgcgatcttgatttgggtcttaaatacttgtgattcttacaaacagaattctatactcttaaaccccaagtagatggccttgatattataaattgtattatttcaaaacataatttcaaaaagattaatattagtaacacattagccaacatttaatgagcacctaaatgtggcaggcactttcctaaattctctctatatattatctcatttaatccttactaaaaccctaaggggtaagtgctattattatccacattttacagttgaggaaactgtgactttgggaagtatcagtcagtaaccgtggagttcatccaggcagcgggatcaaggttcccattctcttaaccaaaaattagacaaattaaagagataaggtaaaaaaaaaaaaagcctacatgaattaagtgaagattaattatcttcctgtagtatcaaaatgcattagttagccagttttcaactagtcatcacatacatatttatttattagctgaagtgattatgtaaaaatcacactcagctgaacttggaagaaaagagatgtttgacagggtcaatatatttggaactgttttttagactgggagagaaagtgaatgccatgatgtcatacttccccaaagctttggaatttgggcttctgagactcatgtgctgtggcttgcttaatgtccaagattcaagtcagtcctattttgacaggggcatatgtcccatgacaatctgatgacttcagttgacacaattgcttctcttccagtttcatacgttactgcctaagctcaccctacattctttaacaccttccactagtgaaaatagtgatggcaactaacctttcctgaaaacttactgtatgtcacacacttgtgtcatgcactttatgggcactttttcatgtgattcttgtaagtactccataatatacagactttcatatccccagcctgtagatagggaaggtgagcttagggaagtttatgaaacttgcttatgatgacacaggtgacagattcagaactgggtaacccctgttttcaccagacattatttggggtagatggaaggcattcattcatcagatttttattatactatgctttgtgtgggacactatgctgagcactcagaggaagaaaatggtttttgtcctcacaaatgtgtagaatagatagacaagtacacaaagaattaaaagataaggagatgaagggtgttggggaagcacaacagaaggactgactaactccttgagaaactaggaagaatcaagacatttaatgattaatcagtaataagtagtaattaaccaggtgaataagaggaaggtgtttgggactgagggagcgctatgtacagaggcacgatgtccttcattgattaattcagcaaatattttttagtacatatttcagtgaagacagtagggaatgcccttatggactctatattccaaacatataacagcatgtaatgtaatttcatgaaatgcatgacacatttagcacataactactgctggtgtttgcaaagtgaagacaggtgaagctgttgtatatattttcctgttgctgctctaacaaattgccacacacatagtggataaaaacacaaatttatatcctgtagttatagacatcagaagtccaaaatggtcttatagactaaaatcaaggagttgaggaggctacattccttctagaggctctggagaaaaaattgactgctttgtctcttccagctgctgaaggacacttctgttatttggcttgcggccccttccacatcttcagagccagcaacatggcatcttcagatctctcctgctctgatgctcctgtctccttcttataaggaccctggtgctcatgttaccaggcaatcagtgagctcactgcccaatacacatagaggctaatacaataccatggcaccagctttcgagaagagaaaagctttattgtgagtagttggcaaggagacaggagaaaatactcaaatctttctccttgagctgaaggctagggttggttttattataggcataggatagtgaggcatgatctgactggttcctgccatcgggtgatgccagggttcagtctgattagatcctggatcctgccatgtggtgtccacctcctatttcagtccttcctccttggtctgagtgttccacccaaggttgcacacctggttcatctgggcatgttcaggttatgtgaccttcaacttgtgggtctgtggcaactgaaagcaattcacaattttgttatgtaagagatgaaccagaatgatctggtccagctacaatcacattggacatgcacagataatccaggataatcatccctccaccttgatcacatttgcaaagtccttattgctctggaaggcaacacattcatagattttaagggatagaacatggatatttttgagagactgttattctgcctatcacagctataaggagaggtagaggcagacgatgagcttcctttaatttatgaggacctgggctttatttaacagaatcatgagaaatgagcagaagcaaaagtaggccagtgaaaggaaagaatgtttagagttttgtgctggtgagagctgatgaggtctgaataaggcagtatgcagtaggagtaatagacttgggagaaatttagcacatatggcacttggcaattaactggataagtggatgaagaagagggagaattcaagggtgaccctgaagtttttcatatggtcagctgggaagaaaatgttctttatttttggcttaaaataatgttttctgaactgttttggtgtcagcataaatattcatgcaagtacaacattaattgtattgacttctaacaaatcactggttttaggccatccagctggttattcatgtcctctgtttcatatttttcttttctctgttgtaggctaatacttgatatactgggtatgtagcagagatgccttctccagtaaattgcattttggtgtagtatctttgattggagattttaaggtatgataatgcttgacacacatcactttttctggcttttaatacattaagggaagtaatttttataagtacttaaaacagtagaatattagctttcatatatggtttatatatcgtaatttgaacatactaggctctgaagagcttgccagaataggttaattcagaatatttttcaagttccctctttatgtccagtatcattttacatgcttttgttaggtaagaaagaaatatgtttctcttcttaaataactgggggatatactgggcccactgtaataatacaagtgacatagctgaagagatatacaaaaagtattagtcatctatgagtagatgtgaaacagcagagagagcatggcagcaaatggagatagcatgagcaaagaaatggcttcttcaaatgaatgaatccccccatccctaccatatcgagtaacttttatccattctaagttaatttaaatatttattaagttcttatgttaaacactttatttgtacagcctaagaagaatatgtgcaatacatgtttctgtcaaataacttgtattcagcatatataaataagtcatacaaatcaactttttaaaagtagaaacaacccaattttttttgattggcaaagattcgaatggacacttctaaaacgaaagtattgaaatggccaataggcatatgaaaatgtgctcaacatcattagtccccaggaaaatgcaaatcagaatcacaatgaaatactacttgatacaaactagtatgacttaaaacttaaaaaaaaaaaaaaaaaggcaacaccagtatcagtgatgtggagcaaccagaacttcatacattgcgagtgagaatgtaaaatgatacaaccactttggaaaacttggcaattcctcaaacttaaacacacagtaaatcaaactttatagatacttgccaagtgactcagcgattctaccactaagtattttcaagagaaataaaaacatccacacaaagacttgtacgtgaatattcacagccgctttcttcataatgctcccaaaatgtaaacaattcatatctatcaataagagaatagatcaacaaattgtggtgtatttatacaacgggcttctctacagcttaaagagaaaagattagttatatatacaacaatatgattgattctcatacacattgtgttgagtgaaggaagccagacacatgcacatgtttactgcatgattccatttatatgatatacaaaaacaagcaaagccactctataatgatagaaaataaaatagaagttactctgaggggtagggattgattagaagaaataaggcaactcctcagggggatggagatgttttatatttgattagggtattggttacataggagaaaacacttaggatctatacgttttactctaggtaaattttacctaaaaataaaaatactgtgttagataaccaagaatgcaatgatgaataaaatagatgaagtgcctgtctccatgaattctttagttgaatgggtaagaaagtcattaaataagaaatcacttgtgacatgagtcttacgaagccacagatgcataaagcgaggagaaacacctaaaggatgttagatctcctgagagaggtggcatttaagcagattctttcaagttgaggaagaatgacttagatgaaagagcaaagatggaaaaagtttcctaaggatttggaaagtgagaaagaactcagtttcttcaaggagctgaagaagtccagtataactggagcacagggaagactgggaagaatgacagagatgatgcattggacaggtggacaggcaccagtctgggtatagtcatgttcattccattaagggctttatatttttccccggggcaatgggaagacagtgcttggttttactttgtagaattatataactggtgtagcagagctgcttgccagcattccatcagggttcttttttttttttcccacttctttaattgtaataaaatttttagttggacatagcaacccaaagaaaaggcttcatttcccagcctcacttgcagctctgtgtaaccgtgcagataaactctggccaagaggatgcagatgaaagtgttctttggcaatttctggaggccttctctaggagaaaactggtgtatgcccattttcttctttatttcctgcttcttcctgcatccagaaacttagatgtggccttgggccttgaagatgctggtcacacctgagatcagatcctttggacttcatggaaaggaattgacgtggtattcctgagatgtgagagggagaaagagaagagaagagaaaattacctttggatttgtggtggttgttgttgttactcttagctgaacctaatcctaactaacatggtcagatttgcatttttaaagactatcctggctttattattatccctgaacacaaaaactttattcacatttccatattttgcattctcttttctttgtccttagggatgaagatgataaaaatgaagcaatccttcatcaacacgaataacacttggtagttttcactttcaattcctgctagtggctggtttgaagtataggaaaatgatagacatgacccactattataaactaattgccaacaatatgggaaccacatctcaataaataggttccctcccttttatcttgtattgagaaaaattgattagcatcttaaataggaaagttacgtgactctcatatctaaacagctgaaaaatgttaacatatgataatgatttgctacatcaacaatagcagactcttatttttttgaatgctatgatagtaagaacttaacaaattttactcaataaagacctttcctatctgcctttttctatagacaggggctgtgcagagaagtggtatgtaaagaggaacattcctccctcatattaatctgaattttctaggatgtttcaggagagcagagctgcttcctttccttttttataccccccactccagagtccaccaggatctcaatatcctagtaataacaaataatttgtgtagttgttttgaacaattaaatcatgctacttcatttcggtgtattaaacaaaaggaaaagccaacataagaaacacaataaaacagaagccattataacaactgggcttagaacagaaggacattacgagctaaaaatgttttaaattagtttttaatgtgaaaattggaggcattataaatccatcacatgaacagtattgtaatttccagtcgacataaaaaacatcctgataggaaggattttaaagcaccggaacaggctactgaaagaaatttatcaaggtggtttctctagagatctttaaggggggaagaagcttatctatttgagtttgtttagaggaaacttaggaggaggctagaggctgaaattcttggcatttgaagattccttctactagaatatttttaaagttgcttacaaagggaataacttcatgacctcagattaggcaaaaattcctgaaacaaagcacaaaaatggctaaccacaaggaaaaatgataaagtagatgtattaaaattaaaagcctctgatcatcaagacatggcagaataaaaagacaagtcacaggctagctgaagatatttgcaatacataaatccagcaaagacttatatccagagtatataaagaagttctgtaaatcagtgagaaaaaagacaaaccccccaattaagaatagtcaaaagatttgaacaggcacttcacaaaaggggggtattgaaatggccaataaacacataatcattacttatcacagaaaagcaaattaaaaacagaaagagataccacaacctcctccccagaatgtctatatggaaacaaatgtcaataccagggtttgaccaaaaccaactggaactttcacacatttttgctaaagtgtaaactggtacaacctcttcagaaaactgtttgacaagatttttgtttttgtttttatacagttaaacacttaacttatgactaagcattctgctcctaggtatttacccaagagaaatgaaaatgtatccaaacaaagacttgtacaagaatgtcacagcagctttactcaaaatacctacaaactagaaagaacccaggtgtccaccaataggagaagggaggaaaaaactaaaaccaactttggtgtagtctctgcacagtaagaatgaattactcgtgcgtgtaacaatatggatgttgtacaaaacaaaaggagccagacacagaagactgtatgctgtatcaccccatttttgtaagattcaacagaaggcaaaaactaagagaggtaccagaatagcagttaccctggaaatgggggttggtgggaggggattgggtgccaagaaacatgaggggaaaccttctgggatgatggaatttcccaaggtcttgatggaggctgtgattgcatggtgtatacatatgcaaaatattattgcactgtacctgtaaagattagtgcaccttcctgttttcatacctcaaaaaagtaaaagcaataataaattaaaataaattgtatatggtggttctgagtctctttggagagttgtccagtatttccattagacatactctgtaaaacatttttctttgagcccttcagatgatgcaacttgtcatttgaaaaaaaaatggtaaaattaatgaatgggtggggtgtacacaatacatgtcttattaactgtgtcccaaagaacaaaacgtgtttggggtaaggctcatcattattgataatggttataaacccacatttgatagtcttatttttttttttattcctgtactaactggatgtctgtgaatccagagacctgctttcacatacttatggaagtaagcatactttcatttagattcactagctgtatgttgtactgcacagtgaatatgtcgctgttgtggggtaacaatggattatattaattatatatcgctggtgaaattaatcagattgcaggaattgaaaatcatagtgagttttgtcagtctgtctttcaagttataaagccatcatttgtccagccatgctggaccatattgtgatcgagagaaaagtggacctagaatagaaaggatagaggtcaaatcccaattctgtcgtgcattatctctgagcaagttacttttcatccctgagttccattttccttttctctaagaagggaccaataatccctaactcaagaggtcatttgggaaactggaacaaaagaatatttgtgaaagtgcttagcacaaagcataatacttattaggttaaaggctcaataaaactgcagtccttcctttcagtcctttcagaagcaacatgaggcatccagatgtggatttcttctttttgctaaaccgctatgttattggacactctcacctaagtagcagaagcctggactcctttaaaccttatatgactaggggaactctgaaataatgaaggtatctgatgtacgttcagtgtggcctggcttgtcttccagcccctcctggtcctggtctttgcttattcattaaacttagtgtgccttcccctgaattcctttcaaagcttagtcatttcccagaggagcttagtgctcaagtcttatattatgtgccacataatacacaattgtataaaattgctggaaaacaacaaaaacctatagccactgacaccctgaggtggtggaatgggttgccttggtgggaaagctgaccatgtcctagccccgccctaggtcctttatgaacacttgtgctggggattctgtttgccccacctagagccactctgcacccgtctttgccctacttggaccctggtaagaccatgtcacccacacttccctgccctctgacttcctattggaaaacaccagcatgggcaggaggagaaagaagttggaatatttattccccttacttcacctctattgggctggggtttgacagtggctgcattctgctacctgtggccatgggtcctgtcggagggcacctctgctccagccacgcctctctcagagccttgctcttcgggcctagatgggctgtctgcctcccaccattgctagcacagaggtgcttcacctccccttgttgctttccttaaatcttcctgtaccttagtcaatactgcctacggtatatttttttacgttatttagcaaattaccacaaattctgttgcttaaaccaacactgatttcttatattatagttctgtgtgcataagtccaacatgggtctccttgggctaaaatcaaggtataagcagggccactttcctttctggaggctctggaaggaatctgttttcttgccttctctagtttctagagaatgcctgcattctttggctcctggcccctccttctatcttcaaagccagcaatagcagtttaagccttcacgtcacagctctctaaccccatcttttgctactctctctctcttttttttttttagacggattctctctctgtcacccaggctggagtgcagtggcgcaatctcggctcactgcaagctctacctcccaggttcacgccattctcctgcctcagcctcccgagtagctgggactacaggcgcccaccactacacccgactaatttttttgtattttttagtagagacggagtttcaccgtgttagccaggatggtctctatctcctgacctcgtgatctgcccgccttggcctcccaaagtgctgggattacaggtgtgagccaccacccccagcctactctcttcttttaagtttgggcttccccagtaacaagagaatttcttcatcttgaggtccttaatcttaatcatgccagcaaagttccttttcccatgcaaagtaacattcccaggttagaaggttaaggatatgaatatttgtggggggccattctgttaactaccttcatgaaattctcgtgtacctcattgtgccatctgtttcctgccaggaccctgactgatacaacattgttcaattctatcccatagtgattctgtgatatgtgttgtttcacacatgaggaagttgaggataaaaaccagtcagctgtgtttggatttgccataccaatattgagtaattgtaatgattttgttagctttttttaattcccttttatcctcaaacactacttttagttccctattcttcatcgaaatccatattactgaaatcagaaaattcaaaattatttatggatttcggctgctagaactgcccgtaacattctttaaatgttgctagctgaaggcaaaattatttaatttataatatgcatatatatgcattttgccaattgacttctatagcacaaatgtcatagtccagaatgaagtttatagaaagaacaaggattaagaggaaagataaaatctctatcaagaactttcaatttaggaaagctatggaataaggtgggtaaaattgtgttcttgtttctttatcatctctgccttctctcaccatccagtcagcctacttagtctttcttcctccttcccccatctcttccacctttgtcatttgcaggagaaaagtgtatttaatgtgtcattgcagcttttgtgtgaattgttttaatatgttacctctcccaggagtactgacttggtgaaagaaaaaagtagtaagtcctgggtgtggagtgtgaaggtgggggtctttgcaaaccaggccatctggtttactaacagaatattagtgaatattgctgatcctgtgtcataggataaccaatgtataataaaatttatgctatgaaaaagcacatagaagaggaacagttcaagtgaaaagccagggcttgggactgcagatcatgatggtgcaattgtagacaaacaggaacagatttccagctgggtggtcaggaccacccacaagcatcattgggtagatccattaccatgaaagctgcatacgaccaaggatcattgggtttcttgacctccatattctcaatgcccagagcaaatatttcataaatatttgttaaatgaataaatcaaagagaaagaagagtgtgacattttagagtttgtaaccacccttctagagacaaaggcagactgttttttttctggccatcttctgcttctgtgagagcaaagcactcaagagttgacagaaatgtgctggcaacagagagagaggtaaggctccttaggaaatcatagctgttggttttatgagggaatctcaactgatttggtgttctgcttgaaaagaggacagtggtattttttaatcacttttttgagctattattgacatacaaaaagcagtacatgtttaatgtgtacaacttgatgagtttggagataagaatatacagaatatgcctatgaaaccatcaccacaatctgtgccataaacatacctcccagtttcctacagccagcccgctctaatttttattattttgtgataagagtacttaacataaaatatgccctcttaacaaatttttaagtatacagtgcagtgttgttaactaggcactgtgctgtacagtagatctctaagacttactcatcctacataactgaaaccatgggcacagtgatattttgaactacaaagctgtatcaataatacatttgtaatttacttgtaatagaatatcatagatcggttacgaattccacctggccagcacacctaagctcattcttcagatatgcacatgaccacctcgtccacataattgacttcattgatgtctctgctcccatgttcccttatcaaataagttctcccaccctttccccttaccctactctgttgtcctcatagcatgtatcactgtatgacatatcacaggatgatttttaattgtctacctccactagaatgaacttcatatagctagacattttctcagtttagtttcttgttgtgcacctagtactgagaacattacttaacatagagttggcgcttggtgtatatatgctgattgaataaatctggctttgaatctatctgggtgaccttctgcaggttaatctctctgaaccttggttttcttgtcaacgaaatgggggtaagaatgacaatatggtgttattctaaaaattaaagcacaaatagtatgccaaagatcctggcagagcatctgaccctgagtacatcctcaaacgtgaatttctgtactactgtctattataattgtgtgctttcttcatgcatgtaagaatttttcgattatataaaagtattagtaggcatttaggaaatttgttaatagtagtgatctatatatgcattgtaatacttaaatttcatcttattgacaaaatcaaagttgactacttactactaaataaaatgtcgtaatgaaattcactagatggcaaccttggtctcagtactgcaagagttgaatgattgacagaagttcttatttgttaaagcaaattgtaaatgaccacattagatgacacaagcagggcaataaatgtagaaagtgatttaagacaaggttcttataatgtcagtcttttttggtgtacaaatccaagtggtatgtttctccataaaaagtacatgttaatgcaaaatagtgtctccttaaaatgtcaagtgtagtgaattactaggatgctgctgatggtttgtgttttaacctcgaacactcccagttattgtcttgattgttacaaatagcagatatgttttctgacactattattactttattaaataattttgtttaatgcccttatacctcttccatgtctttctaataatttattcatgaggctcatcatattctgcataaagctagcatgattatatttgcacctgaaatttttttagattgagatggatggcaaagatcagatactttaaaaatactttgcagcactgccctctaattgccaattttactgaatataaaatgtatttactttctcttcctcgtggcttccctgggaataatactcaaaaagccagtgaaaacacttcagtacagaggaggcttccaggtaggtcctttctgggccttttctcaaggaattttattgcaaaagcatccgaatgtcctcattatagggtgaggtgacctcttcgggttccctgaattactgatccatggacagctttaaagcaagcaataaaatacgtacagtcatccttccatacctgtgagggattgattctaggacctcccacagatatcaaaatctgtggatgcccaagttcctcatataaaattgcatagtatttgcatataacctatgcacatctcttgtatactttaatctctagattacttacaataattactatagtgtaagtggtgtataaatagttgctatactgcattgtttagagaataacaataagggggaaaagtctgtacatacttagtacagacacaatttaaaaaaaatatatatttcccgtccaaggttggttgaacccacaggtgtagaaactactgatctggagggtcaactgtacccattttccttcctttccatttggcagccattcagtaaaagttggagtgtatgaagtgaagtgagttgggacaagttaagatgattttcccttcaaaaagtctctgtaactctagggcaaagattgaaatgactaataatgcccatttggggaaggtaagtgtcatcttatatcaagggtctgacctgctgcattaagtgctcatttcatgtatttaaaattataggattcggcacctattgaattaaaaagatgctcatgacctttgtttttggaatgaaaataatggatggtcatttaacagatggcatttggcatcatactttgaggagtaatactgcctggatgtgaatccctgctcttccattaattagctgtgtaatcttgcctaatttgtaaaatggaaataattgttgtaatctacctcatggggctgttggggaaattaaacgagttaatataggtagaggtcttggaaccttgccagactcagagtaagtgcttctgtgagtgttttccaaggcgaactgcaggtctcacttcctctatggaagcttcctgtctctcccttaagtgatttattgtccaagccctgtattttggagttttattatatttaatggaactcttttttgtgcccctgctatttttttttttcatttaggtaagtcagttgtgcccacacatttataagatcattgaaggatgggattatgatcaaccatttttaaatccctcctgtgtccccagaccatctagcacagggctggttaagtctttgatttcaaatcattggtgaaaatagatcaaaatggccctcctctacaaagcctgttaggatcttactttcttattccttatagaaaattaactggttctttcttagtcttcctttgtcccctgaactcctcactccctttctcctttccttcctccctcttttccttcttcctaccagtttagcagccaaccagctaacctgctattcagcaaatattgttttagctcctactacacgctgagaacactgctaggtgttaagtattcaaatggtgacctaaatagagatggcctgtgttttcatgtgttttatatgctgtaaacaaatagtttagtactaaattagaaattgctgtagaatggctgggcgcagtggctcacacctgtaatcttagcactttgggaggctaaggcaggcggatcacttgaggtcaggagtttgagaccagcctggccaacatggtgagattctgtctctctactaaaaataaaaaataaaaaaaaaattagccaggcttggtggcacacacctgtaatcccagctattcaggaggctgaggcaggagaatcgcttgaacccaggaggcagaggatgcagtgagccaagatcgtgccactgcactccagcctgggcaacagagtgaaactctgtctcaaaataaagtaaaataaactgaggcttgaaagatgagaataaattattttgccaagatcaatggagaagaggttgagaaaggcctgggcagatagagggaattgtatggaggaggtggcatgaaggggccttcagggaactggagatgccagtgccgctggagccaagtccagaggtgagggtcatcacatgcagccttgcaggcctcattaaggggaaggatctgaagcatgatgggaaaccagggagacagctgaagggctgcagtttctgatgtgcatttttaaaatcattctggttgttcccaggagagtgcttttgagggggcccaagtcagtgaagggggaccagttaggagactattgcaacagtttatacctctgtcattgtattgaacacattgggttacttaatgattaatttgcttgaccctgttgtttgcattactgggtccaaacatagtgcctgacatttgcaactgcacttatttctgttaagagttttataactttgcactaaaattcagaaattacataatcaacttacactacaatatttgatgataaatctgtaatttttaatacatgttgtgtgagatatggtagtacaggatactaaggagtagcaaggagtgctaaagagtgttggggagatgcatgctgccctttgtgcgattcaggaggattgcttctcttcctgtaaccttccaatttgctcaccatactgtggtcacccactgctatctttcacttaggacatgtggcatgatgctgccgctttccacaggcatcagtaatcaagtacaacatccctgctactgaagctggaatgaaagagaaaaccatttgcttctccttgcccagaaaatcattaaattacctaatgctgaagttttccaaaagcgcatgcctaattttttctttgttttatatgcttagcttttgatgttatttagattctgcaaagatcttgcctattgaatctaaatatgattctggtattctgtttatagttttctcctttgccctccttccctcttaccttgttttcaagagataatatgtgcaactgtgaactaagagggcctgtgatagtgtccagggatgtagcagtgatcacaaatgacaaacatacccacttttgcagaacttactttctagaagcaattatattaaaaaaaaaaaaagagtatcatggcagggaaagagtaagggaaggattgctggtgctcatggatgcagtaatgggtcagagaaggctttgctgaatagctgacattttagtaaatacttgaaaaagaattagctatgagaattttggaggaaagtgattgatgtggtttggctctgtgtccccacccaaatctcatcttgagttgcactcccataattcccaagtgttgtgggagggacccggtgggagataattgaatcatgggtgtggtttcccccatactgttctcgtggtagtgaataaatctcacaagacctgatagttttataaggggtttccgctttcacttctcattctttcttgccgctgccatgtaagaggtgcctttcaccttctgccatgattgtgaggcctccccaaacatgtggaactgtgagtccatccaacctatttttcttctgagtctcagatatgtcttttatcagcagtgtgaaaatggactaataacagtgatccaggtgtggggggaacagccagtgcagaggtcctgaggcacagtgtgtctggcaagtcacagaaagggcagagaggccagtgtggttacagggtagtgaattaaggtacagtggtaggagatgtgatcagagagacagaaactgagacacagattgggaaagacattgtagtttgctgtaaggacttgacttttattttgagagaaatggggagccaatgccgagttttgtgcaaaagaattacaaatgtattgactgctaactgttcatcaaatgacagagggaaaacaacctaccaaatccatttgtcttgaaaatggtgtcccaggtatggaatagaaattttctgacactggccttgagtaattatgacatattttcattgcttgggtagcttaatgtcaaataatggagtgtcagctcttctctaatgagttcctggagctcccactcactgctggggagaaacagcacagatcatgaaaagcagatcaatgcagtggagactgtgatgacagaaactgccccaagcagctagtcattaggaagagactcaaccataactgacatagagaggcagcccagagtggtggtgaatagcagagagtctcgggccagactgcctggtcagttctgccatttgcaagctgtatgatgtttgctaagttaacttatttgtgcctcgcttgccacaaccctgaaaggggaacaattatgagttgtcatgatgactatttactatatctaatgtgctttagaaatgttttaaataaaatctacatacactccctccctttccttgggtttatgcagcaggttcattactttgtggcttaagaaaatgagatggctctccacacagccctgttggctcttccctggttcctgatattttcctctttgtctttgggtggtcaggggctctgcagttaagcctgataattcaggtctctcctctagtcctgattgaaaagtgaacagcagctttcccttaatgggaacactctgatggaagaaaatattttggccaagccatcttgctaattatctaaggctcaaaggaattaaatttctggtagttgttgagctcactgcctttttataaatagtttattaaattaatttgatataaaaggatttatatttaggtaattggatggtgattagaatataaatgaaggcatattgagaactagaggtgcagagtcaggcaggcaatattattgaatatatataattctttttttttttttttttttgagacagggtctcgctctgtcacccaggctggagtgcagtggggagatctctgctcactgcaagcaccacctcctgggttcacaccattctcctgcctcagtctccgagtagccgggactacaggcaccctctgccacacctgactaattttttttgtatttttagtagagacggggtttcaccgtgttagccaggatggtctcgatctcctgacctcatgatccgcccacctcagctcccaaagtgctgggattacaggcgtgagccaccgcgcccggccagttccctgtcagaattttcggtccccacagccagtattgtagaatccacgtgggaataagtccctgtacatatcctgttcccaatgtccattgagacttacaaatgttcaactgatattcaaaccaaagtatcatttgagccatacatataaattcaaatgattagaaaaacgggagagccaccagctcaaaataggaaaatggaaaaagtaaataatttgagccaaatatatctgggttgtgttaaaacaaaggatcttttatcttcagctaattatgtgtagctgtctcagggaacaagcaggagttgctgtttgaggacttgtgaaacagccattctgaattgaacatcaaaccggccgcagaggtcgagcgcaatggctcttgcctgtaatcccagcactttgggagggtgaagtgggcggatcacttgaggtcaggagttcgagaccagcctggccaacatggcaaaaccctgtctctactaaaaatataaaaattagtcaggcatggtggtgggcgcctgtaatcccagctactcaggaggctgaggcatgagaattgcttgaactcgggaggtggaagttgcagtgagccgagatcacaacactgcactccaggctgagcaacagagcaagactccaactcaaaaaaaaaaaaagaaaaagaaagcctcagaatcagccagtggtccatctcggtgctgtaattcaccccggtgaatagagaggcctgctgaaatacgcaggtacaggaagtgatgtgtctggattggaaacggttcatgataggctctctggaggactgtgtttgtaccattgctgacaattgggaagagacagtgggcattgctcaagagctggcagagaactactcgagctaaagaaacaaatgccgttttctgagcattaaggttacttggcagaaatctttgatattcaggctgccagaatgcaaacgagggcatgaaataattttagtatgtatttttagtaattttaagaacatgcctactattgtcatgttcctagagccacctgttcaaatttgttgaattgagatggtagcaatacagccacctttagtctcctctatcactgtaagcccctccatgtgatttctgtcatttctcttgtattcttgtgatgatgtcagccatgcgatattttgaaactggaatctgggagctttggaactgttgggggctttggcagaattaaagatgtctcatctttctggactagactctacttggattctttatttatctctgtaaaagaaaaatttcaggcaccaaaggacaggagccatccaaaataaatgtattgtccttccttccctgaaaaaatggagagtgcctagcaaaacccagatgctgcccacattactcctgtcctctgtctaaagatgagaatcttctcttatttgcatggtccaggatgtgagaactggctcagtttacctagactttgagggggatggcagaggacacacctgcaacgtgcagctaagattgtgtctctcctagtaggtgatcaatcaagtctggggaaatgttttgactcctcttttcattcaggtcaggaagtgtggactctggtgataagtcacaattctcttgatgtttggggaacaggtttaataatgacacccaagcacagcctttgcaaacccatggtatttaggataccatgtagcagatgttttatactattacttaaagaaatgattcctatgaaagagaaggattttcacaggcaatttacaaacctgacattgcctctacctatcttcttgcagatacagttagtcttctgggaagggacattgagatcctagcagtgccttgcttgggaacagtgaataatttgttaatctgttgatcccatctgcttctcctgcaaagaaggaaaaaattacatggtgacgctaatggatcttaagcccaaaacaagattttcccaaaaggcttctataaccaaatctagccatactttcctattttttgattccaattttgtgtgtagtaagcctcactaacatttattaaataatccaacaaatgttatttaagtccctttgaggcagtagaccacggagtacagactctggagctagactgcttggatttcaatcctggctctgcaatttattagccttatgatccagtcaatcttcttaagcatactatgcctcagggtcaacatctgtaaaatgggggtaatattagtgtcttagtctgtttgcattgctataaatgaatacctgaggctgggtaatttgtaaagaaagaggtttatttggctcacagttctgcaggctgcacaggaaggatggccctggcatctgcatctagtgaggggccacaagctgcttccactcatggagaatggtgaaggagaggcagtgtgtgcagagatcacatcgtgagagagacagcaagagaggggagggaggtaccaggttctttttatttttattttgtactttttaaagatggagtctcactctgtcacccaggctggagtgcaggggcgtgatctcagctcactgcaacctccacctcccagggtcacgtgattctcctgcctcagcctcctgagtagctgggactacaggcatgcatcaccatgcccggctaattttttgtatttttggtagaatggggtttcaccatgttggccaggctgttctcaaactcctgacctcaagtgatccgcccacctcagcctcccaaattgctgggattacaggtgtgagacaccatgcccagccagcaggttcttttcaacaattagctcttgcaggaactaataaagtgagaactcactcattactgcaaagacagcatcaacccattcatgaggaatccacccatgacctaaatacctcccactagtctctaccgagaacattggggatcaaattttagcaagaggtttagagtgctaaatatccaaactacagcaatttatctgtcttattgggttgatgggaatagtaaatgaattaatacatggaaaaacatttaaaacattgttttaaagctgggcgtggtggctcacacctgtaatctcagcactttgggagaccaaggcaaatggatcacctgaggtcaggagtccaagaccagcctgaccaacatggtgaaaccccctttctactaaaaatacaaaaaaaaaaaatagctgggcatggtggcaggtgcctgtaatcccagctactcgggaggctgaggtaggagaatcctttgaacctaggaggtggaggttacagtgagctgagatcgcaccattgcactccagcctaggcaacaagagcaaaactgtctcaaaacaaaaaaaattgttttattgtttggcacataataagcactgatttaggtgttcattagataatgaggatggttatgcttacaacaatattgatgataatgataattatgttgggctttgaataaaaatagctctagactaggtacagtggctcatgcctataatcccagcactttgggaggccgaggtgggaggatcacttgaggtcaggagttcgacaccagcctggccaacatggagaaaccttgtctttactaaaaatacaaaaattagctgagcatggggtggtgcgtgcctataatcccagctactcaggagactgagacaggagaatcacttgaacccaggaggcagaggttgcagtgacccaggatcacaccactgaattccagcctgggctatagaatgagactgcatctcaaaaaacaaacaacaaaaaatctactatcaagtggctagtaatactgtgtggggatataaccaagtcagtgaagatttaaaccatcccagatttgttgttggatggacctgtgcagtactataagaggatggaggagacttagtgtggggtgatgggaaaaattctagagagtgtgccatgtcagctgcacctcatagaataagcagcttatctagagacagcagtgagagcaatgcttcccaggccgaggaaatggtatgtatggagacctgtgcgtgaaggtgcatgatgagtcggagagtcacaattagcaagcatgtggagtgcaagtgaggagggtgagggattaggctggaggaaaaagaacacaaaaggtctcatatgccttggtggacagtttggattttgtctggaaagcccaaagcatgggaataacagagtcagggtggcagcaaatccagaaaatgaagattggtgaaaacatcagtgattcttaaagcacttggattttctctataaagatgtggttgtgggactacaggatcagggactgtgccgtgtttttaagtctagaaggagtgcacagaacattttctttagattctctattactaaggcaggaaacagatggcgtactcactaggatttttgaaaataaatgttaagaaagggactacttagaggtatagggaaggtttagaaaaccaccaggggacagagcaagacccaggaggtagctgtagaggaggttacagtgtgacagagcctggctcagagctgatgccagaaggaggtgctgcctagtagaggacagaagctggagggaggagccactgccagaactgctttgaagcaggcagggagcgacataccttggcctctcccttctccccactgcctcacctcctgccagtgcttccaattggttgaccccactggaagtaggagagcaatgtgtagaggtcagcctcctgggactcagagagggactaaaaatatatcaggtgagcaaatgggaaatactgggaaatacctagcactcctcctaggacagaccattttgagacaattttaagcctttttttttttcctgtcaaaatctacagcaaggcaatagctgtggataagattggcatttgtggaatttttcaaattaccttctattctgagtcagcaatgtataccaggcttttttactgtaaccagccactttcttctattaggatattccagtggaaaaccactgaataagtagaatccctcctgctcttcttcctttttaatttttttaacatttattatagaaagggcctcattctgttgcccaggctggagtgcagtggtgcgatcatcactcactatatcctcaaactcctggggtaaagggatcctcccacctcagcctcccaagtagctgggaatacaggcgcaggctgccatgcccggctatttttttctttttagagatgaggtcttgctgtgttgcccaggcttgttttggactcaagcagtcctcctgcctcagcctcccaaagccaagggtttagaggcatgagccactgcaccaagcctctttatacttattgaaactcagctgtgtgacaggctttcgagacccattaccacacctgacaacagtctgaaaggtgcttggcattattatgtacttgtactctttttttttttttttagatggagtctcgctctgtcacccgggctggagtgcagtggcacaatctcggctcactgcaagctccgcctcccgggttcacgccatactcctgcctcagcctcctgaatagctggggctacgggcacccaccaccacgcccggctaattttttgtatttttagtggagacagggtttcaccgtgttagccaggatggtctcgatctcctgacctcgtgattcacccgcctcggcctcccaaagtgctgggattacaggcgtgagccaccgcgcccggcctattgtgtactttttacagatgaggaaattgaagcagtaattttccaatgacactacagctagtaagtaatgaaactgggattcaaactcagttttgttttgttttttctatatcccactgcctttaggcagtagattttctttaggtagatctaccaccctactttgtggactgtatcaggtaccgggatctccattgtcatcaccatcaccaccacggtcaccaccactactgccattactattgccatcaccaccaccaaaacaaaaacagtaaataaatacctaagaccaagagcaagtttcatggacactacacccaaacatcctaaagatgagttatttttgcttaactgtagttttcttttttaacaacatgctttaattttggctttgcaaagggatttttaccaagtttctttggcctattctctaattttggctttgcaaagggatttttgtcaagtttctttggcctattctcctgctaatgttttcagtggtgacattggttataatttggtgccatcaaacatttcgatggcgttattggcttacccactactttaatactgttttggtacaactaaaatttttgcaatggagtacacgatgaaattgcttcatgctaaccttccccctcaccaaataatggtgactgctaaaagtccttacaactgcagactaggtaattgaataatttgtatatcaaattaaggtccaaatgatgcttttaatagcacaattactcataataaggaaaaggtcagcattcactagtaattatctattctctataatttttaaaacatgaaaaaaaaaatgctgtgaccagcatatccaaaggggaaaaggcactgtaaaacaccattggtatgagaaaatcatgctttattattaaattagcaatttcatttgagagacataatgtataattgatcagctaatttgcctgaagcctttcatttaaatactgtatttcacagatttttaaatgcacatattctttcacattttcaaaatcaggcaacattgtgtgacatagtttatttagcatcattctttttctgtcttagttgtacataaaattaatccaagtcttaaaatcattactgtcttatgtcagatgaaatagaggattcagatctctttaatttttcctgagaagatacccctaaaagactacaagaactctttagagggagcaaatgctgaatgaatacagaagagtgaattcacatattctaatatgttcattcacttccctaatttatattatgtgccttatctatgtgagacactgtgttagcattttatgggagtaataatcacaatgataaataatataccctactgcatttggatagtgctttatagttgatcaggagctattacatgcatcagcttacttgttctcagagttaaccttggaagatagacattatttctattctctggctaaagaataagtgacaagccttctgcaggttgggcgactcagctaaagtcattcgggtcagtgttgacagagccagaacaagagtctttcaactgcaggtctgctctttccactataaaaacagaggaaagtacaagtgaaaaagaaggggcttccaaagcagctaagtttagtccaccttctacttcacaacctaatacctaagccacccacaccaggttatctattgctttccatgttatttttttattacctaagtaatacatgaacataaacctcctttttttttaaaaaaaaaaaaaagataacatattgagtgacaacacactgtgtgtatgtgagtgtgcaaatagctttatagcataagtggagtcatataatagtgtttagagatttgcttttctcacactatatcttggtgatctattcattcattcaacaagtatttactcttctcagcactgagaaatattcatgtgtagttttctctttctgtcttactctctaaaagatgaggagtattccattatatacatatatatgtatgtgcgtgtgtatatataaaattatggtatccatgtcataatttattaagacacttctctgtcactggacatgtggcttcttttgaatgtaatttcattgcaattaatgttgaaataactacataaaaattatagtacaggctgggcatggtggctcacgcctgtagtcccagcactttgggaggctgaggcagatggatcacctgagttcaggagattgagtccagtctggccaacatggcgaagccctgtctctactaaaaatacaaaaaatagccaggcgtggtggcacgcgcctataatcccagctactcgggaggctgaggcaggagaatcacttgaacttgggaggcagaggttgtagtgagctgagatcatgccactgcactctagcctgggtgacagagcgagactctgcctcaaaaaaaatacatatataatatattatatataataatataatatatataatatattatatatattatatattatataaaaatatatatataatatattacatgcttatctgtataaatgtgtatacttgtgggctagatccctagataggaaggttaaagataggtgtgcttaaattttcattgtttttgcctaactctgcaaaggaaactgaaccaatcatgtgacaggctaggcaaatagactctccaagaactccatttatgaaatggatgaaataacacttacctcacagttctgctgaaaatcctgcagcatagagctatggtagccactctgcagcattttgtcctcttccatggataagataggtccacaaaaaaagtacacaacaaggtagtaaaggctaaggggcatctgaatggcatgggtagttttaaaaggtgagagatgacaaggggacttctggctgctgtgtggaggaagggcggaagactgaaccttgacctgctagtggacaggcagaaatgtgctgggctgccttccaggcagaaagaatagtgcggaccaaggcagagaaaggagatgaatgtgatgggaaaggagtaaaatccagcagaatcctatatgatatgatgaagcagcagcctctcactgcaacttaatacttttggattaaaactttgcctttgcatctcgttagtcatcagcaaaataagctaccgtgctatatctccttagcttggcaattgctttttgtacctcccttctctgcacagtgacaagaattaatacacccatggataaactaccaaaagttgtgcatattcctctagcagggcatagtgttcataaaaaggtcagtgatcaagttgtaacagaggtgaaaaatctagtatgttgccacaaggaagccacatttcaattgaactcattcgaacagctgtgtgcccagcattctgccaggtgcttgagtcaaggagagaaaagagtgaaagggacaatcaggttataagatcaactcccagctcactgaaaactttcatattaaaaatagaacattgcttcatatcaacagagctctctgaagaaccgtgtgcctcactggctctctctttgcattgggttatttactagaggcatttctgagccaatggcaataatagcagggtagttgaaagacactggcgtttttggagaggatgctgctgccaagaggagtgggttttttgtgaacgtaagaaaactggttggtttacagaggcagttggcaaaaaaacccatctctccttgctagttcatgttaccacctggtgaatctgccaaagattatgatgatacactttttggccagcttgccacagctgtttttccaccatttatgttgttcatattgttaggagtgggcctgggatgtgtatctgcatatatacttcttgtgctagggtactctgctgtgtgttacagttcactgatttccacatttgttctgttgacagactatcttgttacgtgccacaaagtaagatttgtggtttgcacgaatgagattactgaaggaaaaagaggtggtgtcttgtagcagatttcaatctcccattggatggataaaatgatctgtggcatggtgccacattgtccccatctttatgcactcgtggtccataatgccatgagtcttttgatcttgtcaaagccttttaggctcttgaattgacagagtgtcttggcgatttcaatgtgtaatctaaagagccaccctaagtcacaaattgattggccctgtcatcaacatactgggtaccatctactccgcatttttgtcttagaccataattgacagagcaggattcaaacagatccttactaactagcacgtttgacctgtgccagtctccaaattgattaggaggtgccaagcccaaggctttcctagagtcgatatctaacaagcttgtaaagtaaaggactgctgtccagacatcttgctattgtgtattttatgctgagtttccgttgtggcaaagatcatggccacatgttctgcaggggtgcacaaaagatgacttttctaacagaatctggatcagagggcttaactttaaagtagaggtagcacagcttttgaaatataaaacaaaagcaataataaaaataaacattcatgtaaaattttctatgtgggaggcatcaatccaagcagtgtacgtggattatatcacttagttcttcaacaatcctatgagatagcacaattgttcccattttacaaaggtaacagaggcatactaagaagatttgttctgagttatgtaggtgtcaagctgggatttgaacccaggcagtttgactttagcatccccaaactataattggtcatgagggtccaagggggtccagaagtagttgtataaacaagaagttcaggcaggaggcagaatcatttcatggctggaccactgcctctgaatagatactcaagaaaatgcagtcctgtcattttctgttcccagctgcctgttatcctcttttgtgactactactagtaatcattgattaccaaaaatggtttgtgaagcaatccaattaagtgagccaagaattacatgtcaagtgttaccatctttatttgcttatgtcaagtggagtcagaggctttctgtgatcagcaaagcaagtgaaaagtggttaatttcctttaagatttgtcaaaatttgtgggcagggaatctaattttcggtttaattttccttcttaacacacaacgtatttttttttctctctctccctattactgctagccagaacacatcatttgtagtttcactttacttgagtgttaggctaataatattaatatgaatccttctctcgtcttatctttaagtaatttgtaaaggatggtcggttacagacctgcttaaatagatgtcagccattttgtaaagatacctgaaaaagcaaaagattttaattaaattgtcttttaagatatttatacttaccccacttgggtgttttttgtagttaatacttttgtgttatttatggtatgcctactataggctggacatggaggaagtgaataagggtgaataaaagccctaaacagctttgagttttctcctatgtaaaatgaatatactaactacatataattatgtagtgtaataaaatgaatatagtaattatatttatttcatagagttgtggttaaatcatatagtcttcgtaagtgtcttagtatagtgcatgtgctaagtactcaacaaatgttagctgtggccacatggctttaagtttgtcttggctcctgatcccatacactggatccagctgactggcctggttcaaggcctctccttgttctataggctattggacctgcctggagacttcctttttctcttttacattgcccatgcctgaactgtgagtgtttttaatcctatactgagatttcatctgtgataacactatgctacgtgttagttatgagtgtaatagagtatttgtttgagatgagatgtgagatggagaatatcttcaattcctcatctaatatgctagtttccttttagttaccactaggtgatcaatgaagcctctcttaaaaagaaaataaagatccatctgagaaactagggctatacctaggatgaccaactaatcccagatggattttgtgttgaaagttttgagtcccagaagctccctaaggtatccccaggactgcctcacttttaaaactcgaagtcctagattccaagaatgtccttggtcctgtgtaagccaggatggatggttatcatatgcatggaatactaaggcagtcaagaatttgcccgtcatatcttgtttgtatgtaattgtttgccataatttaaaaaaaaactattccatttaacataaaataactgcctttaaagtttggtaaaagagataaagctgttacatagcttctcctaagggcagcccttgacagggtcatgagaaatctatgtcttaccctttgctgtgtgtgtgtccgaagtcatatataattaaacagatctagagactgtgcaggactgtttgagaataacaagaagacaactgacaaatgagaagtcccttttattgatttaaaatgagaacaataactggcaagcagacagatgccttgggttagctgatcatcttcttttagcccctataaaaaatgtcaacctagaaaataaaataaatgttgcttgttcatcatggtaccagagcaaaaaaaaagttgagtaatcgtattaggaagacatcaagttttatgagttccactcaccatctgaaggtacttcccagttcagtggttctcacccttggctgtgaagtataatcattgctcctgggtcagctcctcccttccctcttcccccaccctacccagagattctgatttaatttggttggggtatattttaagattggggtatatttgctccttttaagaaactcttcagattatcctaattttcagccagggttgcaactaaggctgtagggatcacttaccctgcaggcatggagaacctcctctggaccaggcactgaaaaccatgcacattgcctctgcttcaactccacaaagaccaaaccatttagtgaagacaacacagcagagtatagcatctattaatttatgtttgcagtctcatgagtataacccagaccatttcaataggacttgggaggagttccaaactgtttcttatggtgggataaatctttgagtggctaatatcctccatttataattgattattagccccaattttagaaattcattggcaaatcttgcccaaatattttagtctctataaaaaaaaaagagttgaattttaaaggggacggcccactaggagcctgtaacaggaactatgtttgctcaaaataaaccaaataataacaaatagagttttttctgtgtatcctttatgctactttcaaaaggctttctctttaccttcttgacttttggaagaagcatattattcttagtgaaatagtcagcattccactggttaggtttaaattagtaccattttcccaagtataaatagctctctttagttgacctaattatttccctgactatgagaaataagtttctgactacagtcaacctataatacgcttttcctggacccatcttttctctgaagtgttctctggtggttctggtccaactgtcgtgggcgagtggaaatagagtcactctgcccctgccatttctcatttacaagattcttgaaagcgaatgactcagtcatgttacactgttttgcaacacaaccagtttaggtttagcaaagttagccgcatcagctatataaatataaagcaagtgcatttctttacaatggttatatgaggggacttctcccagcctttgtttatttatttatttattttttgcaaggccagaaggtaaaggacagtatataattgaaggatcagctgaaatcctaatccttttagcaacactgttgctcttatgagcttctcctgtaagctgcttctaaaatattattttcattttttagttgtggaaactcagacatagtctcacagagagattaaatgacctccctaaggacattcattgcgagtcagaggttgatccagtaatctaattaaggccctataattccagcagtgttgccaaaaccatacttttccctcctcctcctgccaaacccagtaattgagtatgatgacctgcctgcccccttgtgctgaaggccgtctgatcccccccagctgaagccatttgaccacatttaaaggttccacccaggccaagcgtgtgggatgttggtcattaatcagagagaatttaagggaccctcatcaggagtcagattttgccacctgggttttttccggcttagcctttgttggagcagcctagccccattttgtaacgtggtacttgtaatttctgttccccttcatcaggattctcccattcgtcttccagttcctgcaaggctgggagagccctgccttggtgcctgtcccaccttcccagagcccaggtcctttccccaaacctgtgccaagcagtgggagcccggttttctcctgcccactcgccacctgctcaacttcccacacgatgctgaatgtcacatgtgccactgctgtgctctctgtgattcctggatgaatccttgtcttgatcctagactcctgatctcctaacacctgcctgagtcatggcgtcttaccatgcgcctagcagctatgctgcacctgcctgcctggacttctccccattccctactgctgggtcagccccaccccaacgagttcaaggttctagccccaccacctgggaagttctagtttcttggtctggaaagaagccatccattccccacaccagttgaggattctatttgggttcagcactttccttcacttttttttttttttttttttttttttgagacggagtttcgctctgtcgcccaggctggagtgcagtggcgcgatctcgactcactgcaagctccgcctcccgggttcacgccattctcctgcctcagcctcctgtgtagctgggactacaggcacgcgccaccatgcccggctaatttttgtgtttttagtagagacggggtttcaccgtgttagccaggatggtctcgatctcctgacctcgtgatccgcccgtctcggcctcccaaagtgctgggattacaggcgtgagccaccgcgcccggcccactttttatctatttcttatagaacctaacctttttatcctagcacacggggataaccagaaattgcctttatgtcttcccatgtggtccttggcctctgtgctttggattttgagaatggtcctcatttctcatccttactttcagctgtggtgtcaggttcgcttgcttgcttccttgctttttttcctagtttgattttgtggaggattctatttgatccatctttcactgcattgatctagccagcagatggatggatatatgaacagacaggtaaacaaacacacaaacattctgcttatttcctttttaatgatccatggttgccagaatcagagtatccggcttgtgtgaaactgaatggtgtatctgtgtgtgttaccactatcccctgcacagtcccttaaatataattgacattcagcacatgcctattattaataataaagcaaaaactactgttgtcttgtcaaattcaagtttggtgtcaaaatgaaggagagatgtgtgcaagcttaacagaataaccatatcctttactttgtgcaggaaaagaagcaagacaaggctattaaaaatctctggaaataagtaacatctttaaaggaatcatataatcagatgtgcacataatactgaattgtagtatttgaaaatactaggaatgagagagatttgaaataaaggaggcttaggaaggaacagacatgggactatagtaaaattagaatcatttaatgccatgtacccaaaactgacaaaatcaaatgcaggtattctaccatttagtaagtccttatggacatttaggatgtttccaagttttcctttttgaaaataccatagcaatgcatgcctgtagtgtccttttaaacatatgtgcctgtgtttctacagtatagaggccttaaagtagaattgcacattataaacttttagaaaaacactaatttgcccttcaataaagcaaaactagcctaacagagagcatgtttccccgatgggtattctcagtcttctcagtgcttgcatatttcttaggtgaaaactcaatgattgtttttctttgcacgtttctgtttactagtgaacattatgcatcaattgaaaataaggaggtgaatctatatgttccaagatataaaatatagctaaaacttattaagtaaaaacaagttgaaaagtactgtcccgtatttatagatggcctggactcatagaaaactattttacgtatgtacatacgtaaaatacaaaggaaagaaaatgtgcctaaatgtctacctcaaagtcatgatagttgctacctctgctgagaagaacggaattgggagtatagcatgaaaagagtgttgaggttctttgtacatctttgttgtttaaattgttacagtgagaatacattcaagaattaccatatataatttttaaaatattaattgaaacatccatagtataatgtgttctgtcttggctatctgaacctttgttaaaggactgctagaatagccaattgtataaagcaaacatttatataatcagcaactgctatgtggcagaccatgcgaagtatggaaatgatggatagaactgtgtgtacccacaaaatactcagggttctgtgttggagcagatagttatacaaataattaagcctaactgggaaaggcactctaattggagaatgttaccaagaactgtgagaacaaggcagagggagttggggaaatcatctaatagaggttatatttaatttgaggcttgaaaagtgtgcaggaattctccaggtaaagaaggtggaagtgacatcctaaccaggtaaaccattatgtgcaaaggcagaaaaggggcaggcattttggtggctagagaaatggttccgagaaagtgatgagtgatgtagctgagaaggtaagttggtgccgtcatgtcagttttgccagacgggaccatagaaatgggtccgtttcatccttgcatcaccagtacccagccaagcacagtttgagagaacacctgtgtgtgtgcatgtgggcagccttgttatatgtgagccaaactgtctcactattcatggtctcatcatctctgctctactccagctttttccgcccttctcctctgcacttctccctccagtaatgttcccctctcaccatcttccaactctctccattttgtgatttcttgtttttattgcattgatattctcatgcacctctgtcctagagataccctgtttgtctatctcctccctgattccatgtctgcatttcacattcacttgtgcagacagtaggtttggtgcccaaatcatctgatacttttctctatccttgcaattctactgtatactcactcctcttacctaaaattatgtttctctctcctcctgtctctctgagactctaagccccaagccttgatttttcatctttgtgtcccagcaaattgcatggttcatggcaaacagtaagtgcttcataaatgttaaataaatgaattaaattgaataaatgaaccttccttccatttaatggtgggtttttatactttacccatcaaacagtacaatgccatgtgtgattataggacatgacaattatgtggttataggaccatgtgaattatagtaattcatagaagaaaaagaatagtaggagagggaatggatcctttgtgaaggacaatactgtattagaattcagaacagatcagaggccatattatcattggaagtagaagctttttaatagaaatgtgtagttgtgataggaagtgaccctaaccacctcattttaaaatagacagccccttacagtgcctctcccattggttctggtcctgggatttctcatcacccggttttattgccttccatggcacttgtcaccactgggttgttggctccttagtgtctgctcttgtgttagaatgtaagtcatgtgtgggcaagtgtcttgtccgtgtttctcaccagtgtatcccaaagtgccttgcatgtagtggagacttgatgaaatattacataaagtgaatgaatcttctagttattctacagagaacggtacctaaccatttgtcttctgcctgataataaaatgtcatcatttttaagttttcttcttttaaatttcttaggagttagtaggggccacttactaaacaaattcaaaagtctttgcatgtacctgaccccaaatagtcatccatagttattagtaattgcttgttttaagtggctttgaaatcatttgaattataagatgcagtggcgtatacctgcttttaatgctacccttctgtccattccttcacttggaagtagttttttaaagtagaacatgaagaaaatgtagaagtgccactgaatattttaaccctataaatcagaatgcattgcaaataggaactgcaaagttaatgtgatagattagaaattattctttgagaccaggtgtggtggctcacatctgtaatcccagcactttgggaggctgaggcgggcagatcacttgaggtcaggaatttgagaccagcctggccaatgtgatgaaaccccgtttccactaaaaatacaagaagtagccaagtgtggtagcaggcacctgtaatccccgctactcaggaggttgaggcaggagaatcacttgaaccggggaggcggaggttgtagtgagccaagatcatgccactgaactccagcctgggcaacagagtgagactcgttctccaaaaaaaaaacaattgtttgatacctttcctgggtagcagattttttttaaaagcaatatattaacgttgtaaaaactgaagtcatgaactgaataaacacacacacacacacacacacacacacacacacatatatagctgaagactttactatttgctttgaacaatggggcaaacagcatgaaattaagtgtcaggcacattaaatctacagattttcaactttttatatggtcacttttgaacgaataacagtaacttgaaaactagtttgactctaaaacaaattatggcctaaaatacatttgataagtagaaataatatgattgaaaagctagctaaaatagaggttggcattaccttgcttgcagtgtgaaagatttttgctgcttcataatcaataatcccaaatgactctgaaatcccaaatgacttcgctgatgagtaaaaggtacagaaaaataatgtaatggaggaacagagaatcagtggaaaatgagtttggaatctttttctgagcatttctttaaagcatcagaaaaatgtcctgcacttgattctctctgatctgtatatcaaatgtgaagcccagatatttttattattaaggtaatgtgctttcaaatcaaaggggtcaagaagtgcagaagatacacctttgaacctgcagccttcttttgcacctgttcagaaggtcaaatggctaaaggatcaaaattagaccccagaatagaaatggaaaataatgtgcatgcaaagacagaagatgagtgtttttaatttaacaacctggctacattgaagaggaaaatggaaatggaattaaaaaatgaaaagggaagcttattaaaaagaaaaaacgggagctagaaaggatgaaaatgtgaaagaggattttagatggtgttttgtggagaaatgtgatttagttaagtaggaaaactgcatttgtggtgtgtcttttagtgtcattgttcattcacatgcactctgggtgatgtttgtcaaatgggagagtttttctgcttctggtttgttaagcacttccatgggattcaagatttcatttccacaaatagaattcaagagccaagtgagtattgctcagtgagattccagatttctatttatggtcctgaatgatcctccctagaggaggccggtcaccctcaaagacccaaaggacaagtcatattggaagaaaaggctgagcaaatgaaagtgcttccacttggccaagacatgtgtgtgctgattgggagctgggattcatgtttaattggatatttgtgccccatcagcatggatgctgacatttatctttctaataataagagccagcttcatgcccaggccaaagaaatgaccaggatattgtacagtgtttcttatcttttcatactgttttctggaaaggagctatcaaatgggaaccatcaaatcctacacatttttgctttcctgtgggtctgagtgaattacgccccagggaaataaccagtctggcttgttaagtagctgccgacataatatttctaaaaacacattttaattctgatttccacctgccccatatgtcttcaataaaagaatgttagtagcagggatgattgcttcagaccaggagttgaagactagcctgggcaacatagtgagaccctgtctctatttaaaaaaaaaaaaaaatctgggtgttgtggtatgaatctatagccctagctgttcaggaggctaaggtgggacgattccctgagcccaggagtttgaggctgcagtgagcgatgatcatgccaccgcactccagcatgggcaagagagtaagccttgtctctaaaaagcaaacaaaaaaaaaaaaaaagagagagagagagagttagtagcagtagtggaagtggcagctgtaccagaaggaagactaataacaaaatagtaatggcaaagaatactatttattaattatcattaattgtcagtagtatcagggactgaacagaatgttttacatttattttctaattgaattcttatagcaaacatgtgagataaatgtatttatcccctttatcttgatggtgaagcagaggcttagagaaattaagctacctgcttgtgagtaacacagctagtgaatggaaaaaccaagctgcaaacctagatccatggaatgccatttgagcagagtcaggctgagtgtgtgatgtcatacaaacttccttattagatttgttggtctgtttagctcacacttgtgaataaaaagtgtacagtgacagaaaggcttcttttgtgttattcacactaaactccatatctaatacaatgctaggctttgaacaagtatccagtaaatatatttgaatgaatgaatgaatggagacagagcagacacattcctatattttaatacagatccacaaggccactcctgggctttttaagttgctcacctttgtcttgacgtgaaaaccctgctctactataaaattggaacaggaacagatacatggagaaaaggttttattctgtactctcgcttctagaatgtatatatcattaggaaacattatggacaatggagagagctccatacttattgtataattcattcttctaaagagtattcattaaccccctaggtgctaagtgcagagaatgttgtagtaaataggtgtaggaaaatatcagatcaccataagggatatagtgaagacgggatgtgttaaaaacatcttggggattacttaagattacatgatcaaggaagacgaccctgcagaaatgatgtttaagttgagatctgaatgatgagctgaagctagccacaagaacatctgagaaaagagctagctttcattactcaccctaaagtaagggtgggctgtatatgttagaggaacagaaagaacaggactctcttattcttggaacatcaagaccatgacaaagaagagtagaagatgcattaggagagagggccttgcaggcttggagtttggattttattataagtgcaaaggaaagccactgaaggacccaatcaggtttacatatttataagtttactctgattgtgctgtgaacaatagactgtaggtggaaagtgtggaatttggaaaataggaggttattgccagagtctaggtgagaaatagttgcctttgaatgaggtggaaggaataaaggtagaagtgaatgtgtgcatcctaaagatatttctgggtatacccccacagtcttgtatgtacatgtatgtatgtatatatgtatgatgtatgtatgtataaggatgattactgggattttcgtcaggatctaccaggatgtagaaactggtgggagagcagatttgagggaagtcatgaattttgttttgagcgtgttaagtttgaaagttctgtttgttggacagccaagtgggatatcgagtaggcagctggtaaagatggagagggaattaaagagagatattgagaaagaataataaacttgagagtcatttgatttattgacaatatttaaagccagtgggacttgaaactaccccaggagagagtacagataggaagtgaaagggattcccaaaccaaaccccaaagcataccatttaggtcaaagaggaaggtgggacaaagaaagaaggactaactagtgcggtagagagaaaaccattttatgttgtgtggattttaccaaactaaaaataaaagcttttttaaatatagatattcaatctggaaggtccaatgtttagtaataggcattctagaaaggagaacagagtaaacagtagagagagagagagagagagagaggtgtgaaagccaggagaagaaagtgtctcaagaagaaagtgtgttccattgtgtcagaggctaccaggaggccacaggaaggaagttgtagtcttggaagaagtaacactggaattagcaacctgcgtgtctcagtggccatgacaagagcatgtccagtgggaggatgaggaaggaagccagctagagtgtggggagacagcgtgagctactgaaacagattcagttagctcatacaactcttccaagatgctttcctatggagaaaccaggcaatgttattcatcctcaaaaaggagggaaatggtgacacttttcacaacataaagaaacctctaggacaataggctgagtgaaatgagccagtcacaaaaagacagaatggcctgaatccacttatatgaggatagagtaggcaaactcacagaagcagaaagtagaatggtaattgccagagggaatggggagacaaggggacagggagttattgtttaatgggtgcagagtcccagttttgcagaatggaaagagtcctggagatcaatggtggtgatggttacacaacagtgtgtacttaatactactgaactgtacaattaaaaattatgaagatggtaaattttgtgttatgtgtattttaccaaactaaaaataaaaacttttttaaatgtagatactcaatttgaaagatccaatatttagtaatagacattctagaaaagagagcagagtaaacagagtagggaatatactttaaaaactaataatgcatgattcaccaaggcttgatctttaagttgaaagggactactgactacctctcagaaagagtgaaagaagacccatatctaagcacattctcatgaaatttcagaatatcaagaataaaaaggtccttaaagccttctaggggaaaaatgtaagatatcaaaaaaggaatgagaatcaagctactttggatttctcacagcaacatttgaaggaagaaaactgtggagcaatgccttcaaaattgtgagggattgttttttcagcttagaactctagatctagccattttatcaatcaaatgtgaaggtagaataaagactttttctgacatgcagggactgagaatgtttacccccaaaaccatttcttaggaagttgcttatgaatatgttccagcaaagagaagatgtaaactaagaaaaaaggaagattgggatccagggaacagtttatccatccatccatctatccagggcagcaatggaggaaaatatgtaatggcccctttgtagcaggtctggggagcagccagtgtaatctggggtaaagagaactctatgaggtagatctttgggaaaaacagggaatttggtaaatagataatatgattaaaatctttgaaaaaattgataccaacaaaacaagagaaaaagaaatgaaattaaatactccaaagtggccaggcatggtggctcatgcctgtaatcccaggactttgggaggccgaggcaggagaatggtttgagcccaagagtttgagaccagcctggacaacatagtgagaccctcatccctacaaaaaaataaaaacattagctgcatgggggcatgcacctgtagtcccagttgcttgtggggctgagataggaggaccatttgaatctgagaagttaaggctgcagtgagccaggatcacaccactgcactccagcctgagtgacagagaaagaccctgtctcaaagataaataaatacccccaaatactctaacattgcataagaatatttgctccgaatatgaattaaactgtggcatgaatttaagcaactgctggcatatgaaaaaagaaagtctatttacttttaaggctgggaaacttatttgtgattgttagtggatatgacactggaccactgagaatgtgatagaagaaataatcatccaaaccagactaattagcccagcattggaatagtatatgtaatcataagctaaatgctacttattgatttttttacctgtgactcaatttaccatcatacttggcatagcagaccaaatagaggtcttagaatagaaaatattgctgttaaccttgacaatatataataaaagtaatattgtagatgacagaaggtcagactttgaaggcaaggaacaattataggaaaaaaattttaaaaccttatttggaaaatcatatagatttaaatacatcatttaaggttaaaaaataatagatgaactaaaattagtaatactgtcacagacattcagaagaagagacaagaggaggaagctagcatgtgtctgctaattcttgatcattctcattgtggtatcaatggataatcctttgaatatgataaattagagactaataagataaaccactaagaggttacccctggaaattgcacctgaagttggagaagggagatgtttgagttaggaccatgttagggttatactttgaaaacaagatagtttccagtcagaagagatgggacaagaagttcatgttttttactctgagccttttgggataacttattttttaaaaccatgtgcatactttcttttatatcaacaaaagggttagaaataaacaggataaaaagtgaataatagaatgactataaaggtgtaaaaattgcttaaataattaatcaaatgagggcccattattatttattaggaatgtggttgtaaagatacatgcatggacatggattctggaaaaagtttatataaataaaagtaattatgctaatgaggcaaattctcagcaaaaattttttctaattgtatgaaacctagtatttgaagagtaaatacaaatgtataagaatatgtataaagtaaaaaatctattataattcatttacctctagcttatccccttctcactatgttggtggtgagattttcaaagctctgtcaatcttagattgccagactgttttgtctgaattgaacagtccatctgaactggagtttgctcctgtgttaatcacttctggctgccataatgaggtaccacatactgggtgccttaaacaacaaaatgtattttctcccagttcaaatgtctggcagtctgagatcatggtgccgatgtggtttgattttggtgagggtctcatcgtgtcctcttttgcacagaggccaccctccctctgtgtggtggacagagagcgagctctctgaggtctcttatgagaacactaatcctatgtatcagggaactaccctttatgaattcatttaaccttaattacttccctaaaggccctgtcttggaatacaagttgggacttagggcttcaacatgtgaattttggggagacagagatattcagtccataccagccctgtcaatttattcatcatttggctgaattaacagatagataaattgttttaacaccaagaaatcatggacctggggttgggggtggctaacttttaaagcccaagaatgctagtattggaaactttgtatagaccaccccctaccgtaatggattccagagttcataggctctccaagcccccaaatccctactctgccctactaaatacaattgcagcaatattttctagtgcttctgtttttaacacagtgccaacagcatggtgaccgtaacatcccttgggcccatcagccctctcttttctataaaatgatccaaataaaacacttagacttttgattatttgatttgatcttcacaacactttgtaaaatgggcagagtaggtattttctcactttaatagtggtataattgagagacagagagattagcattgccctattgtatagtgcaggaaatgcacctccttccacgataaggtgagtagaaaaagcccttgagttggagtcatgtggctggtcctgaacccagctctgcctttggcatacccagattaggacaaagtcagagtcatctttgatcaggtttatcttaattcattaaggaagcaaactagcactggaaacctcagtaagatagctcgcatctctaatccatattgttctctcctgtttctatcaaattagagtgctatcatgacgtaagcatgaagtttgaaattactgcagacctggactgaatgcagttctgaaattcactagcggtgtgaccttggatgagttactttacctttctaagcatgtttctctactagcagtaatacctactttgcaggttgtcaggaaaattcaagatgatttacgtaaagtttttaagacaactcttcccatgttttgtgggaagaatatcattagaatgatatcgaacatgatgtctggaatggcatcagtatacttttaagccacatccctgaagctaatttggtcaggcttgaccacacacgttctcagaagggtttcagaaaagcaaaagaagagtgcaaatgcatgccaagcctcttggaaatatatctcagaaacctggcccatcaccacctctgccacattcttttagtcaaagcaagccacatggctcccttctaccacccagactcaagaggtggaaaaatagatgccatctcatggcagaggacctttagtcatattacacaggggcatttttgcactgaggacattttttgtcatcaatctaccacattgttattccaaagtaattgttgtagaaatgacatgatgatgatgatcaataacaatttttatggttcgtttttgttttcatctttgcttttgtcatgctttcattcatcgaacattcacagagggatttgccccttggtatgtgctcagggcatacatctgcctttgtgtcacagcacctcccgtagagtgtgctcatctatgtggatgagcgataggttttcctgctgtactaagacagagcagacacaaagtacagtgtgatcctctccctccatatttctcttgacaggctgtgcattctgggctgataggaagaacaggccttgataaccagagccatccaggctgccaggacgtcttgtttcctgttgagtgcctgagcacatctgcttattccctctatgagtttttattgtagacaccctgatgcccagcagcatgtgtttgggggccagcagatctcaccagcgttgcatacaagcatccgcttcagagcttgtgagcagtggcatttacacatctggatagtgtgcttttataaatagctccatgaggtgcctggggaagctgcactgtatctttggcatggaattgggacaccttgtacatgactgtccctggaaatagaggactgcttattctgagtttcagagagaaataaatgacaggacttaccactggaagacataaggtgataccgtgtcattgcagcaaacccaggcctgaataaagagaaacatacctttgcccctcttaatttggtatttttattttttccattttccccctttttctatattttctcacctttttttttgttgtttttttttttttttttttgagacagtctcgctctgatgcccaggccggagtgcagtggcaccatctctgctcactgcaagctctgcctcccgggttcacgccattctcctgcctcagcttcccgaggcaggctgggactacaggcgcctgccactgcgcccagctaattttttgtatttttagtagagacggggtttcattgtggtctcagtctcctgaactcgtgatgtgcctgcctcggccttccaaagtgctgggattacaggtgtgagccaccacgcccggcctattttctcacttttgtcctcttcctatgcctgtgtttttcactggtaccttttaatcctcttcctttcttaacaactgtttttctttcaatcttagctgactatacctaacaccatctcacaatgcctacagctcaagttggctggaatccaaagactctgcctctgtaggctggtgcggtggctcacacctgtaatcccagcactttgggaggccaaggcaggtggatcacgaggtcacgagttcgagaccagcctagccaacatggagaaaccccatctctactaaaaatacataaaataactgagcatggttgtgggcacctgtaatcccagctactcgggaggctaaggaaggagaatcgtttgaacatgggaggcagtggttgcagtgagcagagatcacgccattgcactccagcctggatgacagggcaagactccatctcaaaaaaaaaaaaaaaaaagactgcctgtgtccatgctgctgccccactgcttccccaagccaggcttgagaatccagcagaagaggatgccggtgctattcaggagatattaagatacactttcggtaaacattatatgtgggaggcactatttaaagtactttagttaaaccatttctaatccttccacaaactataagataggtattatttgcagtgaatttagaaatacgtttagaaaggttcagtgaccagcccaaggcccacagtgctagtgaatgccagagccttcaacccaggtctgcatgattccaaatgccaagtttgttttatcacatcactctctgtgtcagttgaaaaagaaaaaaattgagggtcagagatgtgagctgtcttgctaagaattatagtgctagactggctctgcatttttggctcaatataggagaaatctaatcggaggaaaggctgttttagtcccaacctgggaatgtcaagagcgcagctgggacctgaaccagttttctgacactcaaaggatgtaggatctgtgatatatgatggcggaacagacagttctttcatttgttcaacagataattattgagttcctgctttgtgccaggtactgttctaaattttgagattctttgcaaattaagaaagacccttgtcattgtgcaggttgcaagccagtgggaagagacatataataaacagtagaaaaaataacagaattgtatagtgtgttagatgatacttatgatggagagataaatagtggagcacggtaatgagtataggaagctccagaagggagtcttgcatttttaaacagggagatcaggataggacttattgaaaatggagcatttgaacaattctcaaaggctttgaaagaagtgagggtattagccatgtaggtatctgggagaagggtattccagcaaagaaaaacacagacatagttggcatttttgagcaataggaagaagactggtgtagtgggaacagaatgtattaaggaaagagtaataaagatgacatcaaagaggctgggcgcggtggctcacgcctgtaatcccagcactttgggaggccgaggtgggcagatcacgaggtcaggagatcaagaccatcttggctaacacagtgaaaccccgtctctactaaaaatacaaaaaaaaattagccacgcatggtggcgggctcctgtagccccagctactcgggaggcttaggcaggagaatggtgtgaacccgggaggcggagcttgaagtgagccgagatggcgccactgcactccagcttgggcaacatagtgagactccatctcaaaaataaataaataaataaataaataaataaataaatattaaaaataaaaaataaaaaaataaaatgaaagatgacatcaaagagctgggtagctagatcaagtgagcctttgtaagtcattttaaagatttcaattgaaggctggacacggtggctcacgcctgtaatcccagcactttgggaggccgaggcaggcaaatcacgaggtcaggagttcgagaccaacctggccaacatggtgaaaccccatctctactaataatgcaaaaaagttagctgggcgtagtggcaggtgcctgtaatcccagctactcaggaggctgaggcaggagaatctcttgaacctgggaggaagaggttgcagtgagctgaaatcgcgccattgcactccagcctgggtgacagagtgggactcagtctcaaaaaagaaaaaaaaaaaagatttcaactgaggggaaggaaggaaagaacaggatgacctgtttgttgtattagtacatagatgcaggaatctaggtgtggcatgacagtgtttccaatcaggattgtagcaatgttggtaatgaagagattgacatctggatacatttgagggtagaattatcaggtttccctaatagattatatgtggagtacaagagaaagacgaaagtctatgaaaaatccaggatgcagggcctccacagcgggaagcatagagtttctatgatatgaaatgtaggctacaaatgaggcatttttagggggaagaacaggagctcaattttggacatgttgagtttgatatatttattatatgtaaaaattaaactgaagtcatcagttgcatatgtatatatgattctgtagttcaggaagaaaactgagctggaggtatagttttggattcctcagcctacatcatggtaaaagaaaaccaaaaaacaagccatgagactcaatggagagccctgatacgacatgtgaaaaggagattagtacagtgggcagtgagatttgtcttgcatttacccaaaggcaaaactcaagaatcagtaaaaagatgatgaagatctgactttgacttccatatgaaagtacgttttgaagcattaatgtttattaacaatggtgtggcctatttcataggatacgttttcggatgctgtggattttctgggaaagtgctgaatctagatcagtgtttttccaaattttatgtagctcaaaaaaagagaagaaaagaaaaaataatcattttaaattaggagattgacattttgtctttacccaagtaaagttgtttacacacacaagccttgatatattcatcataatttaggtttactaacccccatcttagatgtcttaaagtggattggactcttgcattaggtttaaacttgaacccactaactactgagagtccttgacaacttttggagtctgtggtcacagcatttagaaattttaaagtccattaataatattcagtgtgggcaaattaagagaaaaaaatcctctagtcttatctcctttaaaaaaaaaaaaaaagacactacaacagtgatgtctttaaacagtggttctcaaatttatggtcccaggactttgtcgcactcttaaaagtttttaagaacctcaaagagcttttgtttatgtaaattatgcaaatacgggaaaataacgaatacattggttaataaggatttcaaatgatgaactgacacctgttacttgttaatcataaaaatttaggcttcgataatccattccgttttcgttgtcaacacattgagaatactgccttttgaaggaaatatgaataagctacaattcccagtaaagaagactaggaaatgaagggtctaaaatagatcccctgtgcagaacagacgaaaaaactaataatgcctcactatatgttcagaaaagttatctaagttgcttacacattactggtctttaggggctcttatactatcagaagagattagcatcaaaatttgaaaagtaagaaataatccaggtgatattaaagcagtggttaaagatggaagaatgtgaaataacactatacgcatttaattattctactgcttagcagaaaaggttcaagtctattttggagaacttaaaacttaatgtttaagagttcttttcagttaaacacaaatgcactatgtatatttatctttctttcacctaaggggatatgtattcttcttttacctgttaactttctggccatgagatgtcttccccttaggaggcatgaagtttaagagttttctctgtcataaaatatttaggtccaaacccatgaataatccctaatatgtagattttatagaccattcgggaaacagcatgcaatagacaagatatgtttttaaaattttctaaccacctctttccatgaaaggattaaggtgacagaagaagacattattagtactttaaaattaattaattcatatatcaagtattctatgagctaaccatttttcctgatatttagtgaccttttttgggtgaatgagcattaaaaactgctaaagtagacattaatggtttgttgtgtatgtgtgtgtttcctccttttccttctttctctctctgtaatcttgagtaaaatgacacaataaaagttaataaaagagaggactgggaactaaagaaaggacattgcaagatagtaagggaagaaataggcaattcttagagcttgcaaacacttgcttataatgatatactaaaccgctttctgaaatttggccataaagctcactttgccctgccaatgaatgtaaacagtctaagcattctctattttttgataatcaaccaactgggctcacctagttaagagtttgtacaaccattgggatcttacaattgcagtgttctcttataaatcaaagcccagtaaattaaaagaaaatttatattgtaaaacagataagctaaaggatagttgaatcacaaaataaaaatttaactttaaaggcattttgcaatatgttctttcaatttcaaccttctttaaggcatttaattattctgttacttagcagaaaagcttcaagtttaccttggagaacttaaaactgaatgcttcagagttctttctagttaaatacaaatcagaattactgtaaaacatagctgaatttattatatgagtaaataaaaatagaaatcatttaccaaaaaaaaaaaaaagtaatttgcaaacaaccattctctcaggaatgtgtattttgcataaagttagttcttcctgtaaaacagaaaggcatcagaaaggaaaagcgtctgaaattcactttcagattgtctgtagcaaggccaggaccaattcagaaaggaaatgtctggaattctgcttggtgtcactatgcataggggttaagataacaaactgcctcgggcctctttcagggcagcaaaataaaccaaaattgtctccagggttgtaaattcagagaatgatgtggtagacatgaacattgagaaaaagaactggggcaaatgtttttttaatgtttgccattgggcaggatgtttttttcttatgagcttactgtttctagtaaaggtgaaatgctttatttctttgctttatggactattattatttaggcttaggcccctactgcgggaagaaaaaacccagcagcatatcagagaaagtcatcctctagggatggctgtgaagagagtgtaggtgttggatgttgaggaaaggagacgaggcggtcgaaggcattgacagctctgcctctcttttcctgccttcagtgggaaaatatgttgaattcaagtgataaggtttaacatgtacttcttgttgttctaattgtacgtggaagtgaagtgtaagctctttaaaggaatcaggttatgccattcactcccaacatttggtagctgttggggatggaggaaatgttgatggaagggggagtaactgagattgaccctggatgctacaaaaagagaagttcaggcagaacaaatcaaagtcagctctgagaatcccaaaagaagcagcagactggggtaactggagtcattacagctcttaaagtgtggcaaactaatagtaatttcattaaaatgccaaggctgagaatcacctgataaatggtatcaatacttttattaccatctgattaagaagagacaaacagtaggaatctttattaccctcattttacttattatgtctgtttacatggaggcatttttgtaggctcataccatcttaatttttttttttgagacagtgttttttattttttgagacagtgttgctctgtcacccaggctggtgtacaatggcacgatctctgctcaaggcaatctccacctcccaggttcaagcgatcctcctgtctcccgcgtagctgggattacaggtgcatgccaccatgcccagctaatttttgtatttttagtagagatggggtttcaccatgttggccaggctggtcttgaactcctgacctcaggtgatctgcctgcctcagcctcccaaagtgctgagattacaggcatgagctactgtgcccagcctcatacagtcttaaaaatctatgcctaaagttttgagtatatgctcttactagtatatgcctagtaagagtatatgctgaagaataaagcaaagcaactccttgagtgttaacctcagaatctctgaatttatgataaaaggaaaacttagaacaaaagcatacatggtgggctggtgaggatgcattctgagtcaacttagtgtgtttgggtaaatctccacctgaagcccagctgaggctgagcgtcctccctttcccaggatatgagcaagttaaagaatgttcttccaagaaggaaaaagtttaatatattgatgtataagcaactttatctttctgcctttcccttcctaatttacgcctctgtgactggtttacaggagttttcaaaagatgtgattagctttacttgcaagagtttcagggtaatgatgtgtcagctataaactcattcagctaatccgaaggaacatttgtagagcaggaaagaactagattcagaggtgctgacttgtgaaacatggtggtaagtgatttctagctaaaagatctaaaattctagcttcctagttgtgcaaaggaaaggaggtgatgatgagcaaagagaaaaagaaacctaaacatcatcaacaataaaaacatttattcatttataccctccatgcccaacgtcttcctctctcatcaaaattaggcaaagtcaatatggtttcccacagatgttagagggaaaatggctgcagcccattaccccagtatgaagggctgcaggcatgtttgattaggagccatgtaggcataacacacagcagggtagagaagcaagggctgaacgtgaaagtcactgctgattaaatagcaagctatgtctgtgaatgctgtttcatttcattaattcattcacttaatccttgtggatgtacacgggatctactgaaaacaagacactctggggaacacaaaattataacagatctcaccctcccatcttcaccatgtattccacttactaggattgcaaaacaatttaccctaaaacttagtggtattagacaactgtttatgatgctcatggattatgtgggtcaaggattcactcagggcactgcaaagatggcttgactctctattgtggtatctgggggccttggctggaagatttgaaggctggtggctggaatcatctgaggcttgttcattcatttgtctggtggttggtgatgactgtcaactgagaccttagctggcaaattgaccaaaattcctacacatggtctctccatgtgacctgggcttcctcacaacatggtggttggtttccaaaggtcagtgccagagagtgaatcaggcagaagctgtttcttttttatgacctaacctcagaagtcacatagcattaattccactgtactacattggtcaggaaggtcacataaccctgctgaaatggagtaggagggagcatcaaccccacatattagtggaagaaatgtcagtcccattgaatgaaaagcagatacatatgtatgtatatatgtctatatgaaaacatacatatatgaatatatggacatatataaaatcatctttggaaaacaccatctaccacaattaataaaagaaaaatatcacagtacaaaataaaaagtgatcagcattgtgattattttgaaagcaatggcccaaggactcatatgactggaaatatacgaataaaaaaaaaacacctgagcattgtgctttccaaccttgaatcgcttccgtattacttccactgttttcactatgactctctcaccatctgcaccattgtttctttatttttttattaaaaattggcccaagggatagttgtgtctttaaactcaaatttgtttaaaaaacaaagaagatattgccacagaaaataaaatttattttgccataattatttgccataaaataaagggtaactttaaatacactaaaaagtttttaaaagttattagatgctagatatactacctttttttaagattctgagactgaagcaagccctttctttgtcaaggaaacaacaacaacaacaacacacatgtcagcaggtgttacaatcacactcctaccaaatgaaggctctccttttgccttaatctgaaagatttgatagagaagtggaaggaaattatgcgtatggagaagagcagggataataatggccacgtccttgtaccacccaggagccttcaaacagctgccaatatgatagccttactttttttggcaaacactgatccaacatgataaaaattctagatagtgaagcattaatctgtctaaaaccaaattcctgggatctctgagggagaccatcagagcatggtcatcccatgggcatgaaattgatgcttattcactaataaatgtatttgtaatccatcatttgtcaaaggctaagcttttctcactccctgcgtttttatatgtgtgtgtgtgtgtgtgtttgtgtgtgtgtgtgtgtgtgtgtgtgtgtgtgtgtgtgttttcctcataaatacttccctgaaagatccagtgaacaaaaaaaagaccttgactagttggcttctgtataaagcctaactgcccacattatcttattaccattctccacatcctggtggaattgactttttgcttccccactttggtataactaatggtcctggacatttcagggccaccctaagtccagagcccccaggcagacttgcagttcttagtatacagttatctaaatccagtaacattcgttcctaaaaatattattagcacttcctggagccagtgttgtgctaggctctagaaatgtcagggacagcgagagataaatactttcttggaatacagagaaaggcacttggggccagctgtgtctcccctttaatgtaattaattgcttagcaaccccattgttttttgctagagtattcattaaaaaacactacttcctagggattccttgggattttttcttagcagagatggttagatcattttcacagcttctccacctggacctttctttgtgcttttcagcagtattgagaaggtctacagaggttaggagaaagacaagaactagatatttatcttcagggaatccagtctgtagcctttaacacactctaagacttttaactatagtgtcttcctaggcatggggccagcattgacagatcttccttctttatttatagtcagctacggtgaagctatctaaaccggtggctctatggacccagcaggatgtctgcaagtggttgaagaaacattgtccgaatcagtatcagatctacagtgagtcattcaaacagcatgacataactggtaaagtatgcagtatcccagatatttcactccttttctttctcccagtcacgatagcctttcccatacccttaccatgaaacaacatcttcctgctgaaattttctggcatgggtttacttccaaaggggtgataaattccagatccatgtgagccatgctatttaacaaacatacatggttattatagaaaactgtggattttagcatccattgtaaaagtatatgggaatcagggtgcagggttgggggatcctagagaaaataagagcatgccaatcatagagaaaggaaagaaggaagtctttcacatgaacttggctacaggatcactatgtagatcttccaagtagaaaaggtttctaagtaggaaaatgctttttaaaaaatgtctaagataaagtatattgacttctttgggtgagctatacacatgtatccaatcatgtgaaagagtccatggtggaaagtcggttttcctgacactcctgtcctctggccatccatttccctgttgaccaccttcttgtatctgcacctagcaatgttccaagtttctgaaatggaatataataatactaactctctgcccttgggatgaatagtttcaaggcacagataacgattccatttagatcaagggtattcaaatattatacgtggaggtcagtaagtacttgaaagcagaaaataggccaggatagtgaaccataaaggggcttcagatcaagtctctcaattgggggatggagtgggcaagatggagcaaatatgcccaccgtggaagcccatcagagtaagggggcttttccagaccttgcctgccctttcaccctaagatcctgcttgtatgtgggcaacacttcccttttccctgcacaaacagtgcagtgaaagataggactgaggatacactctgtaaaccaaaactgtgtggcttcaagggggaaacagtgttaagaagtcatttctagtccagatcttttttttctgagaaaatgctttcactctggtggtaaagtgacttgtcatgaaatagctcagcattctcgatgacaaacctctttccaaacccacactttctgtcatgacaaatcctaatctctcttgttctgttcactcctattactttaaaaagggacttgttaagcagaaagtatttctttttgcagttcagctcttaggctgtagctgtgagatctggggcaggtcagttcaccttcttagaataggtctcagtcgatggttttctatgtgtgtttcatggagcccttgactgccaaagggatgtgggtgtgctttgggtagaggcgggtgcgtgaaccaaaaccactcccttcatgtctgttgtgtatatttgaaccatacagaaaacttgattgattttgaaaacttgattgattaaaaaaaattttttttaaacatttaagcactaaatgttttaaaaaaaatgctgagctagatgatcctagattcctgctgaccacattgatatgtctaaatatatagggaaaacacccaattgtagctcaagttgagttaacaaacaagagagtaaaatccttctatcttaaatataaaaatggtcctttatgcatttcctctctgtcactcccaactagagtcaatggcccttttggatgaaatctcagaaattcggaaggcagtgtgggtacttagcttcgattccaagtgtctacattcattttcttagttcctcccttaagagtttaagaaaagcccatctagggtcagttattctactcctaactgtaatcaatcagttagtaaccatttgcctgattatggtagccttcatcagataatggctgcttaatgttttttaatgcctgtgcgatagtaatggcaaagcctttttcatgatcttatttgaaagcagtgttatcttttattaggggtgagaattatgaggtccccttgagggaaggataagcatttataatggtttgaagaggatgagccttacagtcctcagaaataaagattcatgcatcaatgcttatggaataaatggtcccacttcccaaggttttctgctaagtgacatgaggacaggagtgtgggaatgaggtatgcatttaaaaaagttgtcgtatgcttttggtggcagacttggtcttcatgaaacataccaggtattgggaaatcactactttcttgggatcttgggcaagctgcttattaacctgggcaagttacttaacctcactacctcatctccaaaataaagaaaatagtacctggctcagagagatgtcgtgaaaattaaatgaaataatataggtaaaccactaagctaaccatttcttgactccttttacatgttggcattgtgctattagtcatgtcaggactcacctggaagtgtcgaaaaacatgctgttatttccttttaagggcagcctattttctggcaagaagaagaaagcagggaattacttggggacttagggaacagagagaatgatttcagattaacttttggtctacatctttttgacattcacctatttgaagcctcagaagacaactctcttcccctgttctctggcccctgcttctctaagagtgaatgcaaaatacccaaatgatcacaagtgccaagtggccagaaaatagctttcgggacttcagccagtgtgcatttaccagccctatgatgctagaagctgtgggaatcccaatactcttggaggctgtgatgaacagggcaaagaggtttgtaaaactcaagatgtgatgacagagcaaacctcaccagggtgtgcagacagtagaatgacttaagagaggacaggggagtggttacaagtaccaggtcacagcccagagctgcatcgcaaccttgtgattttgtaaaggttgctgggtgcatggcagcttgtcacctgcagaaaaggagatgctaatagtatctacctcatagtgttgctatgaaggtggtacacagtcacagtgagcatacagcgcatgtgagctgctgctcttttccaagtgttgccctgatggtatctttgataacaaaacaatacacataatgttgaattcatccagctttattatcctgggaaaggagggaaagaagcatctaagggaaacaaaacattctgggctggtaaatatcctgtgctaatctttaaggctgcagaaaagattgttcatgtatctcttatttatgcttagattctcctgagtgctgctgttcttttatttttcttaaagcaaggatctcctctatcatgctcattgaggaagcatgttatatcagtgttatatacaaacatcccttgatttagaggcacatggtccagtgacggtaaataaaaaagacatatattaaatggagagaaaaagaagaagaaaacagagataggttttctgatcataggtctgagtcaaatcctccctgctgccctctacaccaacctttgacatgtaataaaaacataatgccacacgttagtttcttgtcagtaaaataatatttatcttaaagaatttgggggaagattaaatgggatgatgaatgtgaagggcctagcttaatgactgacatataatgggcattcattcatccatttaggaagtatttatggaccatctaccatgtaccaggttttcagaatacagtggtaagtaagatagtcagtgatccatgtaggaaaaaattgtgcttgcatggaaaactatgcatggtcatctatagcacaacattttgggttatctaattctttgattctagggagcaattttataactctgtgagttgtagataacagagggtaatacaatataatttttctccattgacatgtaacttctgttccacagaggttcagttgacttgcctaaccactgtggataaggtgagttttacctcccatttacacatttatttcagtcttcctgatctataattgtgtccgctgttcggattctcccttgagctggttgtaacatcttgccagtttcctcattaataagttaaattaaaatcttaaagatgcgttcacttccatatttgtatgacagtcatgattttaaccttttctgaaaattacgctttaacctcagtagtgtttaaattgtctgtatttgtttttacaaagagttctactatatgaacatttgtttctgtgtttatttgaagaactttaaattctaaacaaaattttcccttaggtgcttcaaagtctaagaaaactttagacatgttttaacttatcagtgttcaaaatcttttgcaatatcaaaatttttgataattttattgtgcccagaagatacctgctctttggtggcagatgtgtttaatcagaagagaagctgtagtaatcccccctcatctgcaagggaaacatagcaggacccccagtggatgcctgaaaccatagatattactaaacactatttatatagtgtatacatacatacctatgataaagtttaatttttttaattaggttcagtaagagattaacaagaactaatgataaaatagaacgattaataataatataccataataataattaggtaaatatctctgtctcttgaaatatcatattgtactgtactcatctacttttcagaccacaattgaccacaggtaactgaaactgcacaaagtgaaaccgtagctaagggggctgctgctgtgctaatagcattaactccctgcagaagcacactttttttttttttttttgagatggagtctcactctgtcgcccaggctggagtgcagtggcgggatctcggctcactgcaagctccgcctcccgggttcacgccattctcctgcctcagcctcccaagtagctgggactacaggcgcccgccactacgcccggctaattttttgtatttttagtagagacggggtttcaccgtttttttagccgggatggtctcgatctcctgacctcgtgatccgcccgcctcggcctcccaaagtgctgggattacaggcgtgagccaccgcgcccggccagaagcacactttaaaaagaataagacggttagaacactggaaaggcattaggatatatagactgaaatcatgaggttaggtttaaaggaaagaaatttgcgtatgtttctgtgcttgcaagattctgtccctagctttctgaggcctggcctggaatgctgatgaggaggctcttctggggccaggtgtaagctcacaggcaactttcagattctgttatgcacagtcaagtatctcttcaggtttgaagtttcttcctgtggtggttgctaacatcacttcacctcgtttggcttcaaatcctctatctgtgaagggttccttcccctgccaactttaaaggcttgttttcagaggtgaagcactcagagctccccagaatataaaatattttttaaaagctgctttgaatgtataaagggtttccttggtctacttcatggacgaaccatgggtatcctttagatgtctacaagaacaaatagttgtcatatgagtatcgcttacaaatgattcctattgacttattatatttctaaatgatcacctacacaatagatgtatgcctctgttctgtttttttatgctgcaactgtcacccacttgtacttcttttcctttttaaaaatattctgctgagatgtagcaccttgaaattgggcagttctgaatatgctgttgagtaaagggaaaatcactatctttttaggacctttggaatgtggctccatgcatttgctaacgttgttctcttcagggctgatttttctgggctgttctactcctctatccttctgtgattgtcttccaattcttttattatggttagagttccctgtagaaaccaatggggtgtgtagctaacaagtgtcaaaaggagtagaataattactttatgtgatgtacttacgagaatactacttagtagaatccagtataaccaaacaaaatgtaaacgtatttaactatccagtgtgtcagctacacattttctcatctttatcacttctgctctggatattgtgatctactttcctatctctttgtatttgttttttcacatttcttttttgtgtgaactgctctatactcttattgaaacttgagcataattttatatttacatagtaaagtttctgatatgattagaacataagttgtttctcctaattttccagtagagccattgatttttcattttaaccccttttaatggaacacttactagctttctaaattataaacttactaactttaatatacatgaattatttctcagcgttcttaaaacaagggtactgaacttcgttttcttgatgattcaggggaaaagaattctgagtgttggaaaggactttagatgtcttccaaggatttatgggatcaatttaagaaaaaaaaaaaagaccctttcaatgagaaataaacacaagtggaaggtcaatggaccacaaaataccagctccattcctgataaaagtctttggagaatgtaatttatatctgtagacaaatttatttactaagaatgtttcctctctaaatggatcatcccagtcactggcacaactgagcactgcctcttttaaggcttggcagaaagcagactacgtcagcacacaggtctcaagtgaggacagaacatgggactgggctgaatgagtagcaaatggaggacaggagagaggccaagagcgttagtcagggaagtccctccacaagggaataggaagaatggaggctgagtgtcccccttacaatataggtacatgtccccctgtgttaccctttctaacatccctactgtgtagttggacagcctttgcttcaacacctccagggatgagcattttatagttttaaaaaacagtctgtttttctgttcaagatgttggattattgtggtggtgatggcggcagtggcagtggtggtaatggtggttgttgtcagtggtggtggtgctaggggtggtggtgatggtgtttggttttgcctatactccctcctcctctaagctgaaggcccactgaactactttcaagggttgtcaaatgtcatactctctaccttcttgacacccacccattcacctgaataattccagttttccttctggcttgagttttagataccacctcctatagaaagccctccttagttctcttcatctgggttgagtatctcatctctagttcctaggataaggctctattgtaagacttatcacagtaagttggtagttgaaaagtttaataagaaagtgtatgttgaagtttgactgaaacacacccctaggtcctgtttaggttcccaggttagaaactcttgccaaagaaagctcttgatgactgcccccattagattcttgcttcctggcatcaatgaagtataatgctatcttccagtcccttcctttgttctagtggactatttattggatatccccaaatgcctcctcccaagttcctattactgaatacaacatgtccaggtttcagacacacacaaaaaattacaaagcatgcaagaggtaagaaaataacaaactgaagagacaaagtaatcatcagaaccagattcagatatgacacagatgttaggtttatcaaataggaaatttaaaataagtatgatcaatatgttaaaggtactaatgcaaaatgtaaactatatgccagaacagatgactaatgtaacagagaagtggaactaataaacaatcaaaagaaaatactagaaataaaaaacactgtgatagcgagtaagagtgccttcaaggggatcatcagtagactcaacacagccatggaaagaatcagtgaacttggaggtaaatcaatagaaaccacccaaaccaaaatacaaagagtaaaatgaatgaaaacaacagagcagaacatccaagaattgtgggactatattaaaagatgtaacatatgcattactagaatatcagaagaagaagacagaagaatagttcaaatagtaatgacaacagatttccaaaactaatcacaaacattgaaccacatatccaagaagttcagataacaccaacaggataaatatttgaactacttttctcaaacacacacacacacacacacacacacacacacacacacacacgacaaaggtaaaattttgaaaggagtcagattttaaaaacaaacaacaaacatcatgtaccttagttccagagaaaagataagaattccaggacacttctaatgagaacctcttaagcaagaagaaaatgagtgaaaactttaaagggttgaaacaaaaaaaaaatgaccaattctatatccaataaaattattcttcaaacataaaagaaaagtaaggaaaggcttgcccaaacaaacaaaaactgaagcaattcagtgtcagcaaactgccctgcaagtagtgataaaagttcttcaggcagaagaaaaatgatatagatcagaaacttgaatcaacagaaagaaaggaagaatgtcagaaaatgaataaatgaaggtaaaataaattccttttttcttattaattgatctaaaggctaactggttaaagcaataataacaataatacactgggttttataccatatagataagtaaaatgaataacagcaatgccacaagggatggaagggaggaatagaatgctttgttataaggtacctgcaatacatgtgaagaatagtgttatttgaaggtggacttagattacttaaaaacgtatattgttaactgtaaggcaaacactaaaaatttttttataaaggaaagataaataatgtgttgagaagataaaatgaaatggcctcaaatactcagttaaaatcagaaaaggtcaaagaaaaaagagagaaacaagagcaatgaatagaaaagtataaagatggtaaattttaagtctatcaataattaccttaaatgtgaatagtcttaacacactagttaaaagacagagattgtcagattaggggcaaaaaaagcctaactatatgctctctagaagaaacacactttaagtactcaggttaaaagtaaagtattggagaaagatgtattacactaacacagtcaagactcttatagtagttatattgagttgagacaatgcagacttcagaacaagagtgaaaagaataaagacggcaattagtctgagcgtggtggctcatgcctgtaatcccagcactttaggagaccaaggcggatggatcacaaggtcaagagattgagaccatcctggccaatatagtgaaacctgtctctactaaaaatacaaaaattagctgggcatgatggcatacacctgtagtcccagctactcgggaggctgaagcaggagaatcgcttgaacctgggaggcggaggttgcagtgagccgagatcatgccactgccctccagcctggcaacagagcgagactccatcaaaaaaaaaaaaggcaattacagaatgatacagggttacattctccaagaagacgtaacaattctaaacatttgcactcttaacatagagtgtcaaaatatataaggtgaacactgataatattcaggtagaaattgataaatttaccattacagttgtaaaacttcaacatcactctctgatgatctgaacagcattgtcaatcaatgtgacctaactgatatctatagaacattttatagaatgtatgtccaatatacattcttctcaatagatgcagagaaagcatttgacaaaattcagtgttgatccataatttttaaaaaacttaccagaaaagtagaaataacagaaatcttgataaacagcatttatggtgaacgtacaggtaacatcatcctaaatggttaaaaaacttttttctatacagaataagacaagaccattagctttcttaccttatttttttttaatctatttttgtatgtgtgtgacagaatctcactctgtcagccaggctggtgtgcagtgacacgatcttggctcactgcaacctccgcctcccaggttcaagcgattctccttcctcagcctcccgagtagctgggattataggcatctgccaccatgcccagttaatttttgtatttttagtagagacaggatttcacaatgttggccagattggtctcaaactactgacctcaagtgatccacccacctcagcttcccaaagtgctgggattacaggcatgagccaccacacccggctacttaccttctattaaatattgttctgaagaccctggccagtgaaataaagcaagaaaaagaaataaagacaaaaagattagaaaggaagaagtgaaattatttttatgtatagatcaaatggtttatataaaaaactatgagatctagagttggagtgttgtctagaatacatggaaccagaagtgttttcagttttgtatttttttggattttggaatatttgcagaatacataccagttgagcttctcaaatccaaaaatttaaaatctgaagtactgcagtgagcatttcctttgaccttcatgctggtgttcaaaaagttttggattttggagcatttcagatcttgaattttcagattagggatgcttaacctatatgaagaaaaaaatcctacaagaactaataatataacttagtgcgcaaaatacaagattactatgtaatagctaaacaaaatatatctaagactacacagaaaactgtaaaacattgctaagagaaattaaatatctaaataaatggtgagatatcccacacttgtggattagaagactcaatgttaaaattatgtccattattctaatgacctatagattcactgcaatcacaatcaatataacaccagattttttaaaataaaatgaacacattgattctgaaatttgtatagaagtgcaaagacgttagagtagtgaaactcatatagaaaaagaacaaacttttgaggacttgcccacctaattttaagacttactataaaattacaataaccaaggtaatatggtactggaataaagactaacttgtagattataatagtagaacaaaatagaaattccataaatatactcacacatatatggccaaatgtttttcaaaaattgtaccaaagcaatccaacgagagaaagggtagtctcttcactacagggtactggaataactaaatgaacttcatttagtaagataagtgaacttcaactcctgcatcacactatacacaacatttaatttgaaataaataatggacctaaatttaaaactttatagaaggaagcataagagaaaatttcacgaccttgagaataggcaaggaattattatatatgtccctggaagcaccttagtttaaaagaaaaaaaattgataaattggtctttttatttcttttcttttttcttttcttttctttctttgttattgtttttgagacagcgtcttgctctgttgcccacgctggacttgagctcttggcacaaaagatcccatggccccaacctcacatgtagctgggattacagatgcacacaatcacacttggcttctaaattggtctttatcaaaattaaaagtcgtctgcttttctaagaatccatcaaggaaatgaaaaagccaagccagagacaagaagaaagcacttttattatatatctaaaaaagaacttgtatacaaaatacataaagaacatttaaaactcaagaagacaacccaataatatgggcaaaagatttgaaatgatacgtcacaaagaaaatacaagaatggccaaaaggcacatgagagtatgctcagaaatattaagtcatcaagaaaatccaaataaaaatcacaatgaaataatactttacacccagtagaatggcttaaattcccataccaagccatacccagtgttgctgcggacgtggcacacatgaatctcttgtatgtatgttgtatgtgagtttaatatggagtcacctgatttgaaaatgtcaagtttcttatgaagttaatcacaaacttatgagatgattctgcagttccactccaaggtatctacccaggagaaatggaaacgtatgttcttaaaaattctagtccaataatttcaaaagagattagaataaccaaaaattctaaacaacccttatatcagtcaagacgagaataaattgtatgttcacaccaaaacctctactcaactataaaaaggaacctactactgtgcacacaatgtgagtgaatctcacattgtgctcggtgaaacacgttaaacccaaaagggcacatattatgtgattccaatcatatgaaattctagaacttgcaagattaacctgtagggatagcagtcagatcagtggttgcctggagtagggggtaaaagggaattgactgtaaaggggaatgaaggaggtcaaaatgttttgtatctttgtcaaacatcatctacttgatatttcaaatatgtgggatttattgtatgtaagttatgtctcagtaaagtttgtttataaaaacttgtgtacttttccattttttaaactacataccattcttaaaatgaaaagatgaacgtgttatcctgcattttttccattctggccataggatcatttagattaaagatggatagatggatggatggatttggttttatatttatccatgatatagatacttatagagaaattgagtttgaaaatccatatttgcattttgtttttcactgaaagaataatctgaagataccaaagcattcttataaagaaaggcacggtgttgcctgttgttaggagatgactgctgacaaaggaacaatactctcttctcttctccttgagattctgctcgtctgagtcttcatcagtgcatccaagacttttggatttcatagacaagttaaattgcagaaagcatttttgcaaatgacatagagttgccaccttttgtattttgctcattaatattttttaattaaaaagtactctcaccaccattttataaaccaaaggaattttaacacaaaatactcacgatttcaaaatagatttttgcttgaagaaaaacatacattatttttatttctcccattttcatcacagaacagcaccaatttgtaggctactgtaagtaaactactgctccaaggacacattcatcgatactctaaattcaaaatttatttagtgatagtatttgacaggaaaagagtggaaattgtcaccagatgaactatttgtttcataaatcataactagaaggaatattcttactatgggagcagccttgctttagaaaatccctgacatccttaataatgcccatggtttcttggaggctttctatgtgcaggatgctctgctgagaaccacatggactgtagttctgtccagtacatgtgatgcctgtccagtacctagaactgtgcctagaactcctcagtgtgaaagagttagtggctttcaacaatcttgcaagctgttacaggtgaagaagtgaggctcggagttcaatgggtgactcaaggtaattagaggagctgagcacttaccatcaacaggacccaccacacaggcttgttgggaggattaaggagttaaaacccggacaatatttagaacagtgcctagcacatcaaaggacatcaagaaatattacctattatcattactagtcaataattagtgaattgataatcatttaatgacaccactatgagccaaacactgtgccaagagagatagactgtatcccattgctgtgaaatattttatagaaaagcatggcatcgtgatgtcagactgcaagggacctccttctgtctcctttttttcacatgaataaacagaaacccagagactaaactgatttgtacaggggcaccggaaaatgttcaaagctcagtgacatggctgtgggagaacaggagacccattcttatgaaaagtccattaggttacctcatttagaaataaccagagtggggttctgaaatggacaagacactcttttcatgagtgtgtttttccaaccaaattcgaggagcagaatgaagcctttatagcaaaggacttgatctcctactgcctcacctttgaccagatccagttattttttcccctgtctttattctgttctctagtctcctgtgataatgacacatgatactaaatcaaatatgatcagacatctgcatctgcttacattgtgaatgctgagctttatactctatcggagaaactaagtcaattaagtatgatccattctgttgtccctgttttaaaaaactcctgtttccatttgatttctttctttcttagacagggtaggagtctcactgtgctgctaggctgcccaagctgatcttgaactcctgggctcaagcagtcctcttgccttagcctcctgagtagccagggatataggtgtgcaccatcatgcccaactctgatttcttttttattgatgacttgttaattactctgtcagtttattttttggttttgcatgtttttggaaagcactggagtcagattgcaaaattggagatgccctttccccttggttttgctcccattttctgtttaaaaattaatataccacagctgggcacggtggctcacgcctgtaatcccagcactttgggaggccaaggcgggcagatcacaaggtcaggaaattgagaccatcctggctaacacggtgaaaccctgtctgtactgaacacacaaaaaattagctgggcgtggtggcgggcgcctgtagtcccagctactcaggaggctgaggcaggagaatagcgtgaacccaggaggcagagcttgcaatgagccgagatcccaccactgccctccagcctgggcgacagagcaagactctgtctcaaaaaaaaaaaaaaaaattaatataccacatgctctcttcctgtcaagtcagagttcccatccttacagagcctgcatgttattgggagatcaaaaattagacctattagaggcaatcagctaagtagaccaatgactcttttcctttagatggcgtcatttatggtgaggagcctgatgtcatgtgttattgatggaggaaactgaagtccacacatgtaggattgatgatatttacaatcctgtggcactgtttcagtaaaacacaactatcttcaagagatcttggccaagatccttttaggacactacgtttgatcccccatgttccctgttgaaattcttattagagatatttttcaattcccatattaactgtagggtaatgttactcttaaatgtttagaatactcttggcaagcttcatatctttgatacctatgaaagatgagagaaagattggactgtggtgacctgcaatagaatacattccattcattattcacggtgtgtgaccttcgccaagtatgtttaacctcactgagcctcagtttccctttccctaaaattaaattatgataatacgtatcttataaagttggtattggctattattattgatccgtagttgcaggaactccacatcaaagtttgtgagaaagcactttgcaagtggtaaagaattataaacatatatgtgttacagatatacatttgtatgtaaagaattatataaatgcgtagatatacacatatacttatgtgtgtaatttttgtttttttattgtttagaagcatctcactaatctagttaaggccctaaaacctagcaattagtgataatttctccagcccatgaaaattttgccttgcccagtgtgttttttagtaataatgattattttaaatatcaacccatttcctaaacatatacttagcatcgaatactcccaagatatttctctagtaactcaaggtagaaagaattcagaagatgtgattctcgcccttccttaaattatcatcatgttggggaaaaccatatatcttaaaacatatttattgagggtttatatgccaggcaatcgaggaagtatttttcgtatattgtttaattttatcttcacaataaccctttaaggttggtattattattaatattattatcatttgacaaatgaggaaagtgagtttccaagaccttagatagcttttcacatgttatacaagcccagaggtggcaaaaacagtattttaacccagggctgtctgaatccaaagctcatgctttgacctgtacactctgagggataacatcttatatgtgcaggtaagtgatataaaaataagcatgggggtggacatgcttataaccctaataagacatgagaaggaactcttgtctataagcctggttgactgggaagtctgcttagagaaggctggattgatgctgtgtagaattttagaaggtaaagcctctcaagataaacgttaaacttctaaaatctctgtgtgtatatatgttgtttgcctctcagtgaatttaaaaagaaaatataacgtcctgtgagccatggactcaccacttcagggcctcagaccctgccacttcacccccttgtgtgttacccgcctgagtcccgaagacatttgggtatctataccctcaggagggaagaataaaggaggtgaaaatggatcagaagaataggttgtgagctacattacagaatgctttgagggccaggctaaggaaatcagatttttcctctcttgggtatcattcaataccctttaatgagacgtgacatgtgacatcacggctcactgcagcctcgataccctgggcacaagccccagagcctccacacacagcctcccgagtacctgggactacaggcgcacactaccacacttggccaaatttttttgtatttttatttgtagaggcaggttttcaccgtgttgcccaggctggtcgaggaaaaaaagatgttccctttcccaaggccagtgacctaactgtggtcttctccttgcctaccgtcccttgctcctcccacaccacagttcttttcatctgtttctcctctgggtcttcagaatgtctccctccacttttgcatttcagtttgaagacatgctgcatcctgtatccatctcctcttctctcttcttactgccacttttctggtctaaattttcacagacagaaccatttagtctctcttcttcctatgatcctgcctcatggctctctaggaaagtattctcttgtcttttttaaaccggactgaaccaaactgcttcctgcttattgagaattaatgcctactgaataacgtcacaattcctaagtttggcttatgaggtttttcgtcagcttcattttaaccattacaacaatccatcctgtcctgaaaccacagcacatcactctcattcttgcctcagtattagcttcgtgaacttttggtcattttcaggtgctgactgtaattattcccctcctccctaccctctctggacctctccaagcaaaactaatttttccattctgtgtttgctttacattttacacaattaataaatgacagctattattgttagtattataacatttatcacgatattaaagttatttggttccatgtttatctccctcccaccagcccagaaacttctctaaggtagaaattgtgtctgatttatcttactatctctagctgtgttaacccagtgcctggcataaagtaggcatttaataagtgttgattggattaaattgggtttgttcttcctttgatagtcttagcactgaactaaaagcctttcttcatttctgttgataagaatactttgattagtctttcagtttcctgattttgcctccttttcatgaagctcatcctatacttccctatctgcaacttcttacacttacattccattgatgttccagtcggtcttcctgtcttgttcttggagaaaccccattttacttttttaaagaactcctattttggatctgcactaagccccagaatatcatcttcaagtgcgattgaatgacagtctccaaattttgtagcatcctgagccccatgttcccttcagcagttcttcccaggatgttgtggtagactgtgtcagaactttgctcagtgccaagagtgattgtcgcagtgctgtgaaagctcactgagtctgctgaaatttaagtcaggtgctgttttgtagggtggaagcaaatatcctttatctaaaaagcttctatttagggcagcaggaaagaggccctaatctgtcacaccataggtgcattgaatgcagatttccctgtgttacacaagtaacaaagtgaaatacaaatacagtgttttgtttcatacacccaaagtgtccacatttggatagaacaatgctattaatagattttggtttccagccgtttgtggcaatttagctaaccctaaaactaccttggtgacattgatagatacaagctcagcaattacaacttaaacaagagcaatgagaatagtaaatggctaaagtatgattacattgagccatataaaattgccaatattgaacaattttgactagcaaaaatggcagtttcattagatttgccatgaaatcagaataatgcattttatttaaaggaagtagaaaataagtaggagcataatatttattgagcatctactatatgccaaacacagtgtttagcaccatttatgtattaaatcatttaattttcataaaatgtctaagatgtgttatccatctcattacacatgaggaacctgaggtgtgaaagttatgacttccctaagctcacacaactagtaaggtaaaataggtaagaccatattaggaggattcttctaaactgggtttaggcaaactttttttgtaaaggaccagataggagagccatttggctttgtaggtcgtagggtctttgtcacaactgctaaactccatgtttgtagtatataaatgaaagaagtggttgtattccaatgaaactttatttacaaaaacaggtggcaggccagatttagctcagagggtcgtagtttgccaacccctattctaatctcttcttccctttgcccaaatcaaatctgtttccttagtgatatttataaaagaaatttagaattcttttctaaaaatgtgctacttttttttcctttttacatactaaatgtaggaaaattagaaactgtacatacacaaaaaataaaaaatataaaattcccctctaattcttacatccggaaataatctcttatgtaaacattttgacatctatcctttcagatagttttctctatacgaatatttatttctaagaatggcatcataccttaaaggggtggcatagttctctctcttccactaaaaaataaaatacattgtgcatgaatttctgtgtcagtggttgaatacaaaatatgttatttgactgtttgcagttattccctggatgcggtatatgtgtctgttttccagatacattgtacatctggtcccatgtgcttctccattcaacccctgtccccgcttctttggctgggtccatggcccagattattaggttgtactgtgaattcttctacctcctaccctcctatatatacacacacaaacacacacagaggcacatgcaaaacatagcaccacaaaccttccatctccacatcaattagcccttagttgtaagagtcccgattttctttctctagcaatttgtaccttgatagttatcagatttcttcacttttcccatgattgtggccagtcaccagagtgaaaacagacctaggtaaatgagcagcagaagaaatcatacgtctccaaggccctgtcactgtcctctgtagatgccacccttgagggcagtgtaatttctttgaaagttttctttctgtcagcctctctcttctccaaggttcttccaaaagagaagcttgcacagcttttctgcaattcattaaattttcagcatctttccccagtggtaggtacacagcaggtaacatagacaggaggacattagaattccttccaagggagcagtttcaaaaggtcacatgttgccacagtgtccttctatataaatctttcaggggatggtgaagcatgtatctagtgggggaagataggactgctgtagttattccataaggatcttaaccttaaaacttccacttagtaatacattcacagtgatgatcagttcagcacatagaaaaatggggacaagatatacttacctttgcaaaatgagctcccactaagttcaagtaaaagaatagcctctctcccaacaaatgaagaaagctacagagcaaaggatgaagtgatggctggggctgaaaaacggtaccactgtagaatataaaagggaagccacttagtgtctctaaacaatttcctgaacatactcagttaactattctgaggaagtccccagaatcttacaggttttgttatccacaagaaatttcccactgatatttgtatcatacttgaactttataaagtgatatttcacacacattttcaaacctcagacccctgttgatagaatattagtgtgaaactcttttcaaatgaggaatctagaagctcagagatattaaaaaacgacaaaaaaaagaaaaattgacccagaccccatagccagcagatggcagtactcagctcctctgacacctaaggcttttttttttctgcttccagttcaaggacaattccttccatcatttttgctttgtcaattaaatactcagcacattcacagttgactagaatagagccttctatgctgttaacatgcaaactagaggggaagacttttgacaccaagaatgagattgtcctaggagaaccaggaatctagaatgatgtaaattatgtcaggcatagtcattccttattaatgtggaagatattaatcaccaagagaaattgttacctttaattagaaatagaagagaaaggaaaattatacagtaatccttttttgagataattagcaaaatgtcagggacagatggactagaaacaatggaaaaacatatgttttactgatgtttttctttgatcatgtattggatgctatagtggcaaaaacatttcctggttggaaaaactatccttgtcctttcttctgctttttatttaagaaactggctgacttttcttttttttttttgagacggagtcttgctctgtcacccaggctggagtgcagtggcgcaatctcggctcactgcaagctccacttcccgggttcatgccattctcctgcctcagcctcccgagtagctgggaccacaggcgcccgccaccacgctctgctaattttttgtatttttagtagtagagacggggtttcaccgagttagactagcatggtcttgatctcctgaccttgtgatccacccgcctcggcctcccaaagtgctgggattacaggcgtgagccatggcgcctggcctggcttttcttttggggagcttttgcagtctatatcccttcttctttatcacctctggctgcacacatttgagttggatgtttttagtacatttaaaaagaaaggctagggaataaattgaatctacaaacaggtctactctgtttcttgtaaaaggcatcagtagaaaagactgctgcataaaccactaagggtgaaaccaggccaggctcggaaggtaatcgatagtataatgctttgaaacttcatagtttaaaaagataaatgttacaagtatgcattcgtttatttggacgcactacctcaattttacaaaaatcgtcctattccacagtaaaccacacagacggtaggcacgaaggaatagggatgaagttgatgatgggcagaaagaatataaaaaaagaaagaatgagccaactggaagtcagctgtgcaccagccaagaatattcgatcaggtcatacatctgaaatggggctcaaaggcctcatgtccaaaacaatggagttttaatagaaaaccaacctctcaagtatgttttaacactaagattctaaattgggcatttaggaaatgaatattaaagaaattgttgttaatgatagattattatacaagatggcatggtgaattgccctgttcagtaatttatctaattttgtttcagtacccatttatatcttacagtgtttgaaaataataacatttctttccattgcatgtgttctgtggtttggatctttaatttttaggggattttctttttttattctggccatgtgtttacttactgaatattttatcattatctctattgaagtttaattatttactgattagctaaataatttgtaatttattataagttgctaatttacagatcattcattacctactaattgttcaattatctttaaattagtgttcattaatttactcaataaacatttgctgagctattactagatggccagctctatctactagaatggaaacacaaagaagcctaagaaggaatttgggctccttctttcaaaaagcaactctttctgggcacagtggctcacaactgtaatcctagcactttgggaggccaaggtgggaggatcacctgagactgggagttcaagacctccctgagcaacataatgagaccctgtctctacaaaataatttttaaaaattaacttggcataggggggcacacctgtagtcctagctaccccggaggatgaggtggaaggatcacttgagcttaggaatttgaggttacagggagctgtcattgtaccagtgcactccagcaatagatactctgtctcaaaaaaaaaaccaaaaaacaaaaaacaaaactattcttctggaaacaataatctttagcacaaacacatgtgttcactacatttcttcattaacctagtttcacttagctccatttataaaaattaaaaaccggggtgatgttcagaaatttttatctgctgcatttttttccccaagtttgctcacatggaaaaaaaaaccctctggaatatctggaaacactttgagaaacgaaaatgcaaaaagttaactgaatcatcaaaatcagattattgtaaaatcacaaataacatatggcaaattactcttcaaatacatatagatgctaaggattgaaggggtggaagaagagagttggatgaaaatactggaggaaaacaagcttggatgcactgaataaggttaagtggggttcagggattatacttgggttccattgtgctggttatcgtgagtaatactggtcaggctaatcaagcccaaatgaatgaaattgtgtaccattggatggtttgattttcacgtaggacaattccttctatctggaattttgacagctgcaatatttatttcaactagcaaagtgttatttcagatgaaactagtctttgttatttgattctgctcaagtttaaagattttcttgattccacctgactctctagggcatgttagagatatactaagtaaaagtgtgctgttatggattatcctttgccagaatttgggtcatatgccctgaaaaaaagagttgatgcctgttagcctaaattctttcccaggtccaattaacttattgtagtaatagttaataataataacaatagttaatatggttaaggataacgtaattatgaagctcatcacttcatataacattttctctgttttcctctacatccagcatttatgttatgctatgatttagatgggtggtatatactgcaagatgcctccttgattctacttcagtaggaactattaaactattattggaacccagcttccctaatctgatagaaaaccctattctccttttataacactgagcactgatgtctgttcttcactgtgctgtgagaaatgtctccaaacactttaaagaaaaaaaaagggggaaagccacgctagataaatgagaacatcaaaacagtttagtttagacaattttaatggaagatccatatgagtcatcatctgaggcctcaggctctattagtctgttgaaaccctctcttcagtttagcacataacaggcagatcccaacctgtgagctgccacttctgcgtgtggaatgtgccccggaggtttgcttatttgacttatgtgggcagattagatagctcactcttaaaacatacttggaaaagaagcctgtttatcctagaggagaatggttacttaagaccatagactacaaggaaatctcctaattctttcaaaccctcagtaagagtcagctgcatggtatgctcatcttgaataaacagtagaatctccagattctcatgtagtcaaataaatctttttcaattaattacacgcttttgtcaagaagtatctttttcccttcatgtcatttttagaatataaagcaactgattattggcagtagtctacacacacacacacacacacacacacacacacacacacaccttaggacaaggttatttatttactttttttacactggcattttctccagttggttgaaggaggtaagtcctaactacaacagggttcgcatggtggtgtggttcattatttgtgtcttatttcatattagaggtgccagttgaataagaaaagatcttggatggaagcaaaaaatacttttgtaaactaatttttggcagaaatgtttatgaagactttgttccctttgccttttcttctgaaggacaggagctggtgatggaacctttcagttgtgttgtgcagttgttttgaactcctctagggggagctttcacacaggctaaatgtaggatactcgccctggaggcatgacttgggatttcagtgggtatcccttatccacccagttattcctgggataattctccttttgataggcaagctttactgttttaattgtcacgaggaggaggtgacagatgactaatcacaatcttttgaaaaattatatcagtttgtatgtgaatgtaaattaatcagcttcagtattaagtgtcccactctgtgcaaaggaatgtaaattaatcagcttcagtattaagtgtcccactctgtgcaaagggaggggtccttctggttagtgtcgccactaggtcaggagaacaccagaagctgggctttagacttgtacttttaattagaaaattctttgcggatagggttattcaaacctatctcatactgccgtacaagcaatgccaattttttatgactaatatgaaagggattactgccatcctttactaggcttcagaagataatccctaccccaccaccaaactcttccccttcatcacaagtctattacaatgatggaatacatatttagcctcattttaaatttctggatataaggactggctaaatcctactcaaaatgaagaggaaagataaattaatacatgtgcttacctttccttgaaagtaaaattaaagtagattgggtataaagaaaactatctttttttctcaacagatgttaaaagattatttcctatttctccttttttaaaaaaaaattagatgtggtacattgtcactaaaatgtgatttttggcaggtgactgctctaattcagcttccccattatccatggaaggaaagatgagacaaaaagatgcagagtaacacttgttatggttcttggaaatacaatgccctttcataagaaatacaattatttaaaggaaaatgattcttctttttcaaatgtctaaatacagtgggaggatttctgtggaatataaatatttgctaactctttatatacgcatgcgttaaccaaacacctggtaaatattgcaaagtttattaataacttgcaaaatctccaagttgggaaatacagctatgccattatgatcagtcatttggcggatagtcaagcctgacagcaattgtttaatacctttttacccataaacactgtgattcactgaaaatattcaagatttcagcagattttcctcccacccccgaccctgcaccaaattgctcaattatctttcataatgggttctattatctttcaaatttgaagtaatagaaatgactataagcaatgttataaaatgtgtatttcgttgactccccctgtctaagatcctttcaagagctatagcttcttctttgccttcttcctatatttactgaacacctattacgtgctttaaactgggctacatgccatagagcctgggatgaagggtgagaagtagtatgacacaagacacttgtcttcagggatctcaaaatataggtagggagaaatgaaacccaaaagtaagttaaatagatctcaaagcaatctacagttaattgtcaagagaattatatatgaaatgaattctataagaatccagagataagaccattgtggatgcagtgctctaggctgattctaaggttgcagaatttaagctaggccattaaggctatgtaggattaggaaaggcagaaagaaggtaaaggacattctggaaggaaaaggcagcctaagataaaatagcagattaaatatgccaagtgtattagagacagtccacacaactctatgattagaaacacagtgtttttatgaggaaagcaccttgcaataaaaatctttattgtactgtctattgctactgaaatggtacataacacacaccctccaaaatgagtggcttaaaacaataaataattaattagctcacaagtttgtctcctggtgatttaggctacatttgctgagtggaccttctggtcttggctgggctccgtcacttgtctgtgaggcagctggctgttgacttatgtaggacagactctaccagtatgttgggaacaattggggtcctctgctttgcttcttgccctccagcagaccggcccaggtataccttctcatagcaatggtgtggaggtgccagagaagagaatcccaatcttgcgtgtccttttcaagcctctacttgtgtcacatttgctagcattccattggccaaagcatgtcacatagctagggccccagtaccaccccactgccaagcatattctgtacatccatagtgaactgtttcagctacctattgctgcaaaacaaaatgctccaaaacttagtagcttaaaatgacaaccattttattatatttcctacattctgtgagttaagatttcaggaaggatttggctgaggaatttactcatcctaatgatatcagtggtacctcagctggtaggtggactgccctagaaggtccaagacagcatccagagtaaaattagacaggaactgcatggccttttctgacctagtctgggaatgtatgcagtaacctttgctatactccatatgttagagcagacacaaatcctccatgctcccgacttccaggagaaaggacacagacaccacttttctatagaaggaatataaaagaattttcagacgtcttcaaatcattgctcaagcaacgaactgtttctattttatgtataagttattcttagctcctcggaagaccctcccaccccaagactcatctcattactgtatcaagctcagacacaaggtccaggcttgttatctaaatcaggtactggttgagatgaaatttccaataagatgccattccttaggtatagttcctctcaatctgaatatcagtgaactatctgtcctccaacataaaatgaaggaataggcataggttaaccacaaaagacacaggtctgtgttaattctgaaacctcgccaggcccaggctaccagctatgatcacggcccattactgcttcctgggaatgattctctgtgtttcttggctttaccctctaggtgagggctagtaaactttttctatgaagtgctagatagtaaatgtttaggctttgtttgccacatatggtctttgttgaaatttattctttttaaaacaatcctttaaaaatatataaaatccttagatcactggacatacacaaccaggacactgcccaaatttggcccataggctgtagttgaccaactcttgttgtagacttgttgttataccatttgagtcatttttcctttttcacaagaaatagcctctgtttatagctgagtaattgtcacacagtgtttttagccctccccgtagaatttcaggagttcaaagccctcttttatactgtatctaacccttttagtccaagctgtcagtatactctttcaatacagttctctttaaaacttagtggattttccaggaatcttattggaattcactctattagacaaagaaacatgcataaaaatcttcaaaactcctttaactattgtgggtcccctgtgagactgctttgggacaatgcccttaagatttttcaaagccctacttttaaaacataatttataagtcacactcttttaaatccctgtgatgcttttatttttactagaatgatcaatgacatactcccttaaatcttctgacatgttaaaaagtagtttcatcgtcataccctgagtccacactcactgtgaccctacatcattctcacagcatcctggacttgatcttcttgcccttaattaaaacctttgttactttgatgatgtttgctgggaagcagtggagttaagaagtagttttatttttgaactaagcaaggagtaaatgcctcctttatttctttctctaaattgtgcttgaaaattgcaaatttccttttttaactcatctgtcttttcctgtaacgtacaaaacacagttcaaagaaacttttgatattcttctggaaatgtacttagattcttcaaatcattagcacattttatgttttctaaaatactatactcaacagtgtttctaaaatgtctaccacttataagtcttctttcctctagcctccaataatacttttcttacttactgatgacattttcctcacttttctcactgaaagattcctcaagtttttctcatcttttacccactgcctcatgtcgaagttaatgccacctgtttaggttttagtttattaacacatcacttctgataacaaattctgtcaaagttatttattgctatataacaaagaaccccaaaatgttgtagccttgaaaaggagccatattttcatattgcagagatttttatcagtaaggaacttcagataggctctgctgagtgattcttctgaaccttgtaatgttaactgaagccattctcgggtattcacctggccgacagactaaagcctcacttagctatatggctcagaagatttgacttagccagaaacatttacctgcacatggcctttcacacatgactgtctcaggataattgagcttcttctgtagtgggtatcttcctcctaacatagcaaacacccacaactaccaggaagatggtgattggcttttgtggacagcaaagtctaatagttaaaacacaaacccactcagatccaagaagcaggagatatcgtccctaactcttgatgagagaaatgtcaaagtattcaggtctgtgttttaaaaccactgtatggaccattaatgcaagtaatattccatatgagaaatttttcatagccttggaaaaatatctggacttgagcttagactgaccctactcctttgtagtcagtgagaaataggacaactctctccctttcaaccttcattttctacagtctctttcatgcattttcatttgtttatcacacatcccagtgtgtaaacagttttgaacatgtacccttaatatgtgtaaatagccttagatatactctttatcaataaataacctcattattatgttcatggaaaaacatttctaaatagaaaaataaatggatcttgaaagacaaaatattcttaaatatcttgcaaattgtgatgtcttcatattattgctagctaactttttaagccaaaaagatatacgtgtactttatgatgacattcatagttaacaatggtggataaaataaacatataaattagtctttcttgataattttgaatgcagaggccatcttcttaaagagtggaacattattgttgcttttacatgattagtgcagctaattaaatgttttactttggagtgaaatgtgccagcttcattatcttactggttttcaagaactattttaactttgagtctattttatgtgagccaatttagtcaaaactagatattataagccatttagccaggtacatgtaagtagtacatcccagtactgatcaggagccagtgagtgtggccaacactgccttcaccttaagcctgtggatttatcacctctcttgggaatactttatacatcctgaccttccaactaatcttatttctttagataaaaagtaaataaattttaatatacagtctatttccttgtcatatcctaatgaatcatctggcactcccaccccccacccccaactccagggtacaaatatacaccataatgaaagcggtgaagcagttgacataggggacattcaataaacatatattgggctaataaatccttaaaaaccagaatgacacaagtaggtactcagtatttgctgaatgaacaatgaaattgctccatctgtagcaaaaagaaaattgtagaaacacagttgttctcaaaaactcatctcgtcaatgatctagtcaaaacattgtggaagattaggacttattttcctataaattgcattcccactggaggctaatttgaaaaattaactttctgtatcagtgaagattaacagtttttcctcccctccacacccttcccatttgtaacttcatcttgatttcttggatattacatttcataacagccccataaataattgaattttttcttagccgggcatggtggcatgcacctgtagtcccagcaactcgggaggctgagactggagaattgcttgaacccgggaggtggaggttggagtgggccgagagtgcaccactgcactccaacctgggcgacagagtgggactctgtctcaaacaaacaaaattaattttttcaataattagctaagttgagttagcaggattaatatcttctttgctctttttagtaggagagctaaggcaaagtgagctaaaggccacatagagaagacaaaactaccctgggattaaatttaaaaattctgacgcagaggcttttcctatgttcctttgagccactatggccttttgatctttgtttgaagtaaaataattcttgatggttaactgagtggattgttttttaaattagcaaataatggagcttttaaaactaaaagcagttagtatttattaagaatgatgttttatggaatagagttgctaaaacaaaacagcttgttaagttggaagaaccaagatagcagactaccttgcttcttccagaatccttattaagaaggtgaaaacttgactattctgtccacctccgacccaaagcagaacacttctctctgaaagcgatggcaggtagtggttagatatggaggctgatgatcctgtagaatttggaataaagttgcagagtggggaagacactcacaaagaactgctgagcgggtttgacgtctaggtgaggatagagaccatgacttaacttgtactggcaacagtctgcacactattgaaatttctctccagtggtgtgtagattgagaaagcagatggtgtagtctttgacatttatctggtcttttgtagcatgtatacaaggggcactgagtttgaggatacttatcaagggagtctggtatggagttaagtgtaggactggagtgaaaaagtgaactcgggaggaagtgtataaacttgggtaaagaggaggtacagggaacttgagtgtgtatacagtgaaaggacaggattagctggagtgagaacagctggtcacataggaggttgtgataaagtttcaactttaagagctcgaatcattcacagtgagaacgaagtccagagtatggctatgggggtgggtagttgaaaagggttaatagtaagatagtaggttcatttgtatgatagagagtaggattgagattaaaatgagtctgtgatccatgttcctcagggaatgtgagtgactaactgaaaagctgtcaaatgaaaaaaggggcaaaggtgcaattggaggaaggcataacaccaaagggaaaggatgtcttttatgataatgggttgataataatctggaagcagcaatgggaaactgtcaccaaaaatcacctgggacccacttcactgactgtctttccaaatgacatttgtcaaagaggaggagattcctagttggttagtttaaaaataaataaataaaggctgaggcatttgtccatacatagttcttcctagcttaatgaatgcaaaaatagggctaacctccttcttctaccaacattttcccctctgggtttacttgatcattgtgtgatttattttccttaagaatgcatagtgttacctgcatatgaaaagatgcttaatatatatcactaatcattagagaaataataatcaaaaccttgatgatatgtcacttcatggccattaggatggcgactattgaaaaacagaaaattacaagtgtcaacaaggatgtggagaaattggaaactttgtctactgttgagattgtaaaatagtgcagctgctatggaaatcaacaggcgattcctcaaaaaattaaaaatagaattaccatatgatccatcagtcccattcttgaatacatatttaaaagaattgaaaccagaaccttgaagaaatatttgtacacccatggttttgttgttgttgttgttacttaatagtttttttttatttcaatagttttgggggaacaagtggttttttgttacttggataagttctttagtggtaattcctgagattttgccatgtttattgcagcaatattcacaatagccaagatgtaaaagtaacccaaatgtccatcaacaaatgactaaataaagaaaatgtggagacacacacacacacacacacacacacacacaatggaatattgttaagctttaaaatgaaggaaattctgttacatgctacaacatgggtgaacctcgaggacattatgctaagtcaaataagccagtcacaaaaagacacatactgcatgatttcacttatatgaggtacctagtgtaatccaacttaaagaaacaaagtataatggtagttgccagggcctagggagttgttatccagtgggcatagagtttcagctttgcaacatgaaaaaatttttggatatttgttgtacaatgatggtgaatatagttaacactactgagttgtccactttaaaatggttaagaggttgggccagtacctcatgactgtaatcctagcactttgggaggccgaggcaggtggatcacctgaggtcaggtgttcgagactagcctggacaacatggcaaaaccccgtctctactaaaaatacaaaaattagccaggtgtggtggttggcacctgtaatcccagctactcaggaggctgagacaggagaatcacttgaacccaggaggcagaagttgcagtgaggcgagatcgcaccactgcactccagcctgggtgacagagcaagactgcatctcaaaaataaattttaaaaaataaaaataaaatggttaagatggtaaattatgttatatatttctaccattaaaaaaaaaaagaatccatagtgtttgtttgaatctaatttcctgataagaaatattagagacaggcatgtcagggagggtcctatgtatttatcctgtttaagactcttctcttttgtagtaggaggaaaatacttagatttggttcaatccagcttatataacctggttaaaccaacatttctcagcctcctgttgtcattgaaccttgctgtattcttctgtggaaaatattttttatgactggccatagagagaaaaccaaaaaaaagtaaacaatatttttcttgttatctgtttgcacatatgatttccatctactgttaacatttatttacagaaaatattatctccacctaggctttctttatagcctggaaatatgacagctgagaagggacatcataaagtctgtgacaccattagtggcaaggacccaaaggggttttaaactttttcacactttcaaattctaggacaaaatggtttatctttcctttccattttttcccctcctttctctctccctcccttccttttctttctttgttttctggtataacttataaatagtaaagtatacaaatcttaggtacagctcaataaatttttacagatgtgcatacacttatgtaaaccttactcagatctagacataagactatttctagaaccccagcggctcccatgtgcatccttccagttgacgtcttccaaggtaaccactattctaacctctgccactgtagatcgcttttgctttttcattaactttttttatacctggtttttttccacttaacatttcgtcttcagatttatcggtgttgagtatggctgtagtttttgttgttcattgttgaaacattccattgtgtaattatattttaatttatccattctattgctgagggacattggattatttccagtaaagctgtcatgaactttcttgtacatgacttctggtgaaaatgagcactcattttcgaaatggaatcgttgggtcttgtgtatatttagcttaatagatactccaaagttttcaaaagagattatttcagtttatgctttgaccagtattgtaggatagttccagtttctccacatccttgtcaacacttgggattgtcagtgtttttacttttatccattctggtgcagttgtaagaataatccattcatgaattaaataagacagttttaagatgaatgaaagaaagtacaggttcaggaagagcttataagggtaccattagtaggctgggcatggtggttcatgcctgtagccccaacactttgggaggttatggtgggagaattacttgagcccaggagttcaagaccaggcctggcctcacatagcaagaccctgtctcttaaaaataataaaaacatgaaaagcgtattacaagtagaaaaaaaagtaatggacttgtagagctgatatttctctaagtaaaatccccagatgaccctttctcagcctcatttatggtgcttgttaaagctacattttcccaggcctcacactagagtcacttagtcagaattctggcccgtgaaatctgcatatataccactcctttggtaactcttatggcattaatgtttgtatgccactacttaaactttttaataacacaaactccaaatggaagttaagaaaaagtgggttcaatctatgatgactgcattttcaggcaaacaatcaaggtgctttgaaatcaggactgtctcagactatttcaaccacctatcacatcaaatggtctagcatatgggtaattggaattccagatggaaaaaagaaagaatgagaccgaaaaagtatttgaactttcttcaggaggccaagaattttgcaaaattattgcagatatcaaagcacaaatccaagaaactcagagaataccaagcaaggtaaataacaaaaatcagctaggcatggtagctcatgcatgtaatcctagcactttgggaggctaaggtgagataatcacttgagcccaggagttctagaccagcttaggcaatgtagtgagactgcatctctacaaaaagttttaaaacttagctgggcattgtggcacatgcccatagtcccagctacttgggaggttgagatggaaggactgcttgtgccccgcaggtcgaggctgcagtgagccagaatcaatcgcaccactgcactccagcctggggacaaagcaaaaccctgtctcaagaaaaaataaaggtaccaaaaatctatcaagcaaaacacatgacactgagacttatattgctggaaaccaaaggcagtatattgtctctattgcaaagatatggaaatacctttgtcatcaagaatgctatggccatctagattcaagttaatcgctcttttttgtacaaggatgacaatgttgtttcactacctctccagagcttcctctccctctgatttatttctctggtgcacttcattgtattatgtcatgatagacctgacaaatctcattctttaaagttgaccctgtaaggtcatgttctccagatattcacaatctattttaagaaactagggttttgttttgtttttgtttttagtttaatgcagctcttactagggccttcctgtgtggcaagtactaagtgtatatggatcatcgaatttaatcctcattttcatgactaccttgttaaagaaatactactataattttttttattttagaaactaaggataaaggagcttaagataatgttccaatttaccaagctaataagtgaaacagctagaatttaaatccagggattcttattccctaatcctactcttacccactctgccatactgcctcttattaaaaaaaaaatacaccacacacacacagactgtacataatatttataaaagtatatcagactttattcccccttttcactgagaattagtccaatttgtgcaagttaggacatatttttgttcctttctctttgttttcattagcccagttgcaacagtgacctggttgaaattaggaaatactcttgaatttgaagaaactgaactgcaaggctgtcatgaagatgcagcattcccttcacagacagatatttgtgatgccttatttgtgtgaagatatgtgataaatcacgagagaagcttagtacccaattcacagtgcaggctgtgtgggtagactcttgacagggatttgggtaagttttagatattgcttatcagcaagtttttacccaacttcactatgtattctggctggcttctctattttgggcaacatgcagcaactagtttttagcatcagattttttgtgtgtgtgcatgaagaaaaacaataaaagatcaataagatgatggcttaccaaggatttgtgttatcagaggtcatatagtagaatctgaagatgcttaatattttggggtaattctgctctgattgtcttagtgaatgccagcgtctgttctttcatgcttttacattatcagacagggctccttctgccatatctcctcccttgctttctcccaacacacacaggagaatatttatggctgcccattgctcttaactagaaggaaaacaaggccaggaatctctaagggttaaatgacattccatagataaaaggttggggtgttatccacacaataacagccttcagtctttgaccccataaggggcttttctggctagagcagtccccttataagcctcagtccttggacattttgtcactgtttacatttctatgcagaaaacatggaaaaagtgttttctccatgatgtttcagtgttatttctccatctgccttttctttgcatcttacgtatttctctctcatacttcgatcttgccttttattaagggctctgctccttaaatgttcttttttagtttctgtactttatcaaaacctcagaagtacctccggtgacccaacatctctggcatattaaatctgagtgtcaaatgcatgcactttctttgatatatgatctaataagccttttctatctctaatttcaatgattttgtaataccaaattatttccttttgtggtgtgtgattttttttcttctcctctaacttccctaagttcaataggttttcataattaaatgcagtggattgtttagaataaaaccttggaaacatgcctttttcttatggaaagacaaggaaactgagctctgtaaatcagaatattaagcttaacatataatttataaggaagaaataaaggaaatgtaaatcaccctcaagtaagctcactttcatcttaaaaattagattgaaaatcgtgtggatacatgtgtaagttatgagaagacattctgaaaataaaatctcaaggttaaatacagaagcacatttagtagatatttgagcaatctccagtatcttcaaaggttgtgtatgtgtgttcaatcccagcaatgcatcccatgacttaactcactttaaaagtgagttctcacatatctaaaaactcctcatgagtttttaaattttttgatcttttacatgaagcccttggctggacacagtggctcgtacctgtaatcccagcattttgggaggcagaggtgagaggatcgcatgaggccaaagttcgagaccagccagggaaacatagtgagaccctgtttatacaaaaaaaaaaaaaaagaagaagaagggagtctgtggcacacacctatagttccagtcacttgtgaggcacaggcaggaggatcacttgagcctaggagttcaaggctacaatgagctatgattgcactacagtctgagtgacagagccaaaccctgtctctaaaataaataaagcccagatctgtcataatccaatgcagaaatatgtaggacctgaggcgaaaaggaaccagtaagactattgctttacaatcaaagaaaatctgaaatgttataaattcacactttcagccatgttcagttttcaaagtactctatgaataagggagaactctaggaatattttctgcaaacacattttcttttcattagaagcaagatacagaaatgatctggatgctttgtattgggatgatttggcactggaaaatacaacccaaaccaaataaaatttgatattcaattagaaatttgtggttttagacctaacaattctataacatcattgtaaggatggtgccatctaattgttcagtttaggcacattttgaagctattcttcactgtaatagtgaagttgtaacatttgacatctttatgtggaagacttaatttaaccaatatagttttcattgaattcaagctgttgatgttatgatagcaatacatttatcagttataagatttttttttccattctcagttctgtttttagtggctgatcagtattcattggaatcggcctttcttttgacaaaggctgtctcctggcgtgtgagggtatgtgttctcacagtcacaacatggtggagtgtgtgttgatttacagattgttgtagctgaaggcatgtatcctgctatgctccattactctgcatgcaaaggaaaacatttcagttgtaaaaagcaagctgacttcaattgttaaaaaaatgtagcttctgcaagggtcagaggacaataatacaattctctgtaactttattgtctgtaactttgacttatttatgtttccaagtgtctcctgatgtatggaaactcattatacaaaacttacatctacaaaatgagagatcagtgaattactctgtttttgttactctcttgtccaattcatacatttttgtaagaaagtttcttaaaatcatgttcagtgtcatatagtgattagaagtataaggtttgaaatctggtggtcctagatttgacccacggcatcgcctcttctggctgcgaagtctttgtcaggatccttaaccagtttgcttttgtttgctcatctgaaaagtgagaagaaagtaattgtgcctacctatgagaatctgatgggataattcgtgtcgagcacttatcacagtgcctggcatagaacaagccctctgtaaaacagtttacacataaatgtttgtgtgtgtgaaaatatatgcatgtgtatacatacataggtatttatgatttacatggtgctcaagtacatcatgcactgtgattatatagtgctcatagtgttttatggaaaatgaggcacacataaaatcaatagatgatacacacagaatttttagcagcagatttatcttactaattatgtattgcagaggccactattcaaagtctttcattcctctcacacacacacctactaactatagagacaggtaacctagaagcctgctaaagggtatagtgaagccacctgggctgttttaaaaccatcacaaacaatatggaatgtttgtgtctgacaatcgattgggtaccccttgacccagtgaaaccctgccagtgctttggttccccatgaagcaggctcagagaaggaaatctactttcagaagtttattgggtggtgtcctcatgttcaatacttgtgagggaaatgaaagaagcaggattgggcagaagaagttgggctgtgattcagccacaacgagacctctgccaaccccacagggagctctgaagctaagactgcccttcaaagttatcctgagttggaactagggtacctggggcaggtaccttcatacctcctgcctccctcatctaccagtcgttggatgcaggctactcacaggaagagagacatgaccttgagcaaggtggctcttcttagatccaggaaattcccagaaggactgtcagctgtcagcagcaagcagctggggagttctttagtccttaaggaggatctaagtgtcaccacatgaagtccataccaatcattagaactaattattgctgggaattgtggtttgattcagcctaagttatctgaactctacttttatctggtctttcacactttttcattcttttccacccttccacagtcatttattaaaaaaaaaaaaagaaaaaaaaaatttatcgggcctggtgtgatggctcacacctgtaatcccaacactttgggaggtggaagcaggaggattgcttaaggccaggagtttgagaccagcctggacaacatagtgagacctcatctctactaaaaactttaaaaattagcaggtgtggtggcctgtgcctgtattctcagctactcgggaggctgaggtgggagaaccacttgagaccaggaggtcaaggctgcggtgacctgtgattgtgccactgtactccagcctgaatgacagagtgagaccctgtctcaaaacaaaaacaaacacacacaaaaaaaacagctttatggaagtataactgatacacaataaactgcacatatttaaagtgtatggtgagttttgacctatgaatatacctgtgaaaccatcactacaatcaaggtaatgaacatgactatcacttcccaaagttccctcattttatttttaatccaactctctcttcacaacctttctcccccaattccactgatctactttgtcaagcagttaagttcggtttttctagaactgtatataagtggaagtgatggtactttaatgaggcctcaaaataagaagataaggaaagattctctttctttccaaaagttctcttcatataagcagagaaagaccaggcagcagaggggatggagaagataagctttagatctggaaaaacagtaatccagaattcttctgtcatttgctatctatgtgatcgtagccattttatttatttattttttatttttttattttgtttttgagacagattctcattctgttgcccagggtggagtgcagtggcacgatctcagctcactgtaacctgcatcggccaggttcaagtgattttcctgcctcaaccttcctagtagctgggattatgggcatgtgccaccatgcccagctaatatttttgtatttttagtagagatggggtttcactatgttggctaagctgatcttgaagtgctgacctcaaatgatctgcccggcctcccaaagtgctggtattataggcatgagccaccacacctgggcaatagtcatattatttaaattctcaagccctggcttggcgtggtggctcacacctgtagttccagcactttgggagcccgaggcaggtggatcacctgagcccaggagtttgagattagcctgggcaacatggtgaaaccctgtctctactaaaacaaaaattatccaggcatggtgatatgtgctgatggtcccagctactgcggggctgagatgggaggatcgcttgagcccaggaagtcgaagatgaagtgagctgtgattgcaccactgcactccaacctgggtgacagagcgagacccagtctcattaattaattaattaatttgcaagtcccattttcctcatttttaaaatggggataatagttgaacctacccagagggttgtcacaaagattaaggaatgagaaattgttcatagttatacccagcccagcataattcgaatgaattgtgatgataatgtttttattataatactgatgatgtgaaaggtttatggttcaatttcaatgtaatttctttacctatgtggggtcaaacaaaagatatctaccctaggagaaaaactcagttatcgagtgacctagacacgctagactcttcactgttccacaatctgtagacttggggtttctgtgcttcaaggaccttatattgcaaggtgtgttctagtgactccaccttgccagatttatcagcactcaacagacaaccagttgctttttcctgaaccatacttctctgggatctcattctcccagatttttttccatgtctcttgtcgccccttgggagtgtccttgttggttcatctcactgatctacccactcaggacctcagttcctcgagggatgtcagtcctaagacctgtgatcacacttgctttcttcttgcctgtgggtttgtatgtcagttctaatgatggtggctcccaagctaaaacctcaaaccagacttctccttggagctccagcctgtatagcaacatgcccactttgtatttctattgaatatctcatagatgtgggcagtttggatttattacatgtccaaaccacaagtattgttctttttcctcgtccttgctcactcaatcttccccatggtagcagttgcactttcttttattgcccaagccagaaacatgtgtctcacccttggcaacttctgtcttgcttcagatacctcatttctcaccaagtcctttagattctgcatgcaaaatttcccctctctgagtatcttcctgttaccacctctctagtagaaaccaccataaactatgggctcaacagaagctctaggttccgaactggtttctgtactttaaaaatcacctcggttatcaactggcacatgataagtcattaatggtttattaaatgaatgctgaactaaacaggcgcagccttcctaagtagaagtagcatggttcttgtctttgctctgacaattactagtcttacgactttggacaaatctcttcacttttctgggcccatttcttaactttaaaatgaggatgatagtattctccctttctcatagagccatttattcactcaggaaaactttaatgaatatctaccaattgctgagtgctgcagttactgagataaatacaacccatgctttcttcatagagagcccagagtttagaaggaagaacaggcatgtgaacatattcatgattatattataatcgagtaggtgtaacaatggaagcctacacaaggtacacctttatgtaatgtttaatttgaaatgaaggcattgagtcaggtattataccagacactttctaatttactgcctaatttaactttcacatagaaaactcagagtgattaaaatgataattatcattttacagatgaggaaactgactcagtggcattaaataagttactcaagctcacagagcttgcatgtggagacaccaacctgcaaacccaggctttttactccaagttcaggtctctttactcacacgaaacaatacataattaaaatataagttattgaacaccttattgctggaagaagaatgaatggacactgaactgaagcattttataaccaaatctaaatcagaagagaaaattatacaaaaaaactcacttttttcttcaactttctctttttttctaactttttctgggtctattttttttttttttgagatggagtcttgctcttgcgatcttactcactgcaagctccgcctcctgggttcaccccattctcctgcctcagcctcccgagtagctgggactacaggcgcccgccaccacgcccggctaattttttgtatttttagtagagatggggtttcaccgtgttagccgggatggtctcaatctccagacctcatgatccacccacctcggcctcccaaagtgctaggattacaggcatgagccaccgcttctgagtctatttttatgattctgataaattatagaaagagtcttattgattatagtatgtacttattggtacccacagcgaacaaagtgttacttaaaacaatggcttgaactctttgaggttggagaaccttgtacatgacattttggtccctgaacactggcctcagggtgtttgctaaagaaaacccaagtgaacattgcttttactttctttctaaataattcatgaaatttttagtggcatcttggagtcttaagagacagctcaatttgagaatcactctacgtatctgagatacacgttctgtaataatagaattatgaaaagggaaagaaggacatctaagtggcctgggccttcaagcataagtcgtgagtgagcagtgaatgagggagtgtggtacataggctttggcattcatgcgagtgtttgtaaatataaattggcatggatgtaccatacatttcacctgagggtataaagggtcacattgctgactcacctgtagctagccctcagcttttgaacccattatcatccattgctaatttatattatgtgccaggaactgtgctaagtgcttttctctgtattaattaatttaatcttcataaatattcctatactgttaacatacccactgatgagatgggaaaacggagacttaaagcagggtaagcaacttactgggtagtgtgtcatggtggtgatttgcacccaagcagactccacagagcatccccttaagcgtcgtaaagccatttgtccatctttgagagccagccagtgcccttcccaatcttcaggagttatcttcttcatcatggtatgagctcgacttccttctctcctcatatgtttctcccatcttcttccaactccagcactataatctctgggataaaagagctgagaggataaagccatcatccaactatgtctcaagttccacagtcattggcaccatcactagcctgggtctactaggtgactgttgcaggcctgtaagtcttttggcaaagtcaggatattggcactacagacatggtaaacccagtcaattcaaatatacatgaaaacgcaatatgggactgtcactcttaagctctgccacattctctaatgtggttttctctcaacaacatttattttgacactgcccaaatattatttcactagtttattaagcaatgtccaggattttggcaatacataaatgaaaagatacacccttactttcaagagcttgtaatttgaggagggaaatagacatctttactctagcacttgccaccttgtattttgcctgtaggttccaaggtgagtgaggaagaacttgctgagcatctaagacctgaaccaacccttgaagctcatcagacaagaagggaggaaagatatttgaaggctgagcatgtgtagagatgtggataatggaaatctgttcatgttccttatctcattccaacatagcttttagtatgtaacctgctgacatcaaattttggacttcaagcttgatgagcatattgttactttctttaaggagcaaagggaacatgatgtagatgtgtgtttgtattgtctcttcagcactgaagcaatgccagtgtcaatccatatttatggccttggtttcctcaaatttttgtcacttatcaaataggggaaatttagcccacttttattactcttttattgatgaagcccctgaatttaaacttcacttgaagtgctacagttatgggctttgtgatcctttcagatcaaatgcatggggccaggcttggtggctcatccctgtaatcccagcactttgggaagccaagacaggtggatcacctgaggtgaggagttcaagaacagcctggccaacatggtgaaacaccatctctactaaaaatacaaaaaaaattagctgggtgtgataatgggtgcttgtaatctcaactacttggaaggctgaggcaggagaatcacttgaacccaggaggcggaggttgcagtgagccaagattgcatccctgcactccagcctgggcaacaagagcaaaactctgtctcaaaaaaaaaaaagaaaagaaaaaaatgcatgggtatttttgcttgtagaactgagtcaaaatcccttttctctagtggtggctcacacctgtaatcccagcactttgggaggccaaggccagaggatgggccaggagatcgagctcaggtgattgagatcagtccgggcagcataaggagaccctatctctacgaaaaaataaaaaatcaaaatatatatatatatgtatatacacacatacatataaaacaaacacctagccggccatggtggtgtgcacctatagttccagatactctgaaggctgaggtaggaagattgccgtggtgagacatgatcacaccactgtataccaccccacatgacagagcaagaccttctctcgaaaagagaaaagaaatccttgttctgctacttgtgtgtgtttttactttgtctccatgagcttctatttcctcatctttgacatggaggtaagaatacatcccagggtgttgctgtggattaaattgagacagtgggtagaaaagagcctgacatatagtgggtgatttttcccaaaagtaagtgttttgttgttttgcctcctcagcaacctgagtcctataaacccctattactgaggattattctggcccttgagttaacatttggtgaatcacttggttggaagcaaactcctaaaccaatggttctcaaccaggggtagtttcaccctccagcaaacctttgccaaaaatctgagacatttttgattaacacaagtaggggtagggagtattattgtcatctagtaggtagaggccaaggatgccacacagcatcctgcagtgcataaggtagctggtatcacaaagaatcacctggccccaaatatcagtaatcccctgttctagataaagtgaagcagaaaagtttgtctatttgcgtatcatgttgatgacttttgaaatttgacatgtgataaatagagttgccattttctttttacccctctatcattagaaagatttcccagggtcaccatcaggatcccaccctttcgggtgctcccatcatagttttggagtgagctacacagctccccatagggtcttgggtgacctcttacctttctttaggtctgcttcctgaagacagtgacaggtttttgttttttgttttttgtttttgtttgtttgtcttgagacggagtctcgttctgtcgccaggctggagtgcagtggtgtgatctctgctcactgcaacctctgcctcccaagttcaagtgattctcctgcctcggcctcccgagtagctgggactacaggcgtgcaccaccaggcccagctaatttttttgtgtgtattttagtagagacaggtttcaccacgtgggccaggatggtctcaatctcctgacctcgtgatccgcctgcctcagcctcccaaagtgctgggattacaggcgtgagccactgcgcccagccaacagtactttttattgtgcttaccgctgtgagtagttactcagcacaacatggggagagagggtgtcatattattcccattttgccagcgaagaaatgcaatcctagacaggtaaattatcacaacaatgaccacgtagctaatgactggctaatccagccctgggctttcaactccaaacccaagacctcttttttttttttttaaccagaactttcctaatgcatctcatggtcttcatggtcatggctacagagttttatcacattattgtttttgtagctgtttaatacctgctggtcttacatttctgggtaatttttaagctccatgaaggcaaaagtatgttactgtctcttctattgaatatatctgaagctgtgataatacttgttaatttttctacctaagaaatccctgatactgataacatttatcatttaaaagtttaaggaaatacaaatccctcagtattagagaaagaatgtcaaagtagacttaaaacttttttgaacagtactttggctataggtactggctcaaattgattcacatgtaggaaccagcatgcccagtgcctgttctctttggcatgtgaacattgtccttatgtgtttagttgttatgaccacaaagtagaatattgaggggcaagaagatgcttgttaatagacacttaatgcttcttggcaattaatttaaaaagatgtctaatgcccagtggatttctcaccacctagtgacacttaataaacagagaatcccaaaccagtgcatacaaatgcagacaaataaaagtacctagaggttttgtctacctatcaaaaacagaaaagaccttgaaggttgtttattttatcataaatcttccattatagtctccattatgttggtactagacttctttgcttgaaaaatctgctctgaggtacaaggcaagtaattactgagtcttcccagggactaagacaaaattcccaaacaaaatcttttagggtttttaaaaattaattttttggatgggatttggtaatcacatgtactaacaaacgctgtagaatatttaacctttaacatactgtgtgtgagctgtgtattccttctcggagagctaaaaacaatgcagggtcacattttctgtttgaaaagcactgtaatatatttctttctgaatttatatttcaggtgggaattaatgttattccaattttctcctattaacctgaatatattcagccaaaataatagattgtctaaaatagtatttttacccaagacaggtaaaaaaaaatcaatatagagttcccatcagtatggtaaattacagtaactgcagtgcaaatttccattaacccttctcttccttggcccagagaaggggccttcaattaactgctaatcatctaaatgtaaccaagtgagtgaccggacttgacggtgggcagcgctctcaggtagaagtgagaggagacttattggtcttggaaggttttgtgtgtattcttgccaggaaatgaggcaatgggttggctgacctttaagtccttgctagctctggtattgggtgattcgtagtcaccttcaggaaatcagaggttgggctgggggtcacttaagctggatttgcaatgcatctctaggttatgaaaaatgaagggctagctcagacttggtcttggttggctattgatttagaataggctacacagaatggaatcacagaacttggtggagtccactcctaaagtcagccgaaaccctgcaaacaaggctgcctgaattcctttgcactgaaagttggagggacatggaagaaggaaggttaaaagttaaatttgggccgggtgcagtggctcacgcctgtaatcctagcactttgggaggcttaggcaggcggcttacgaggtcaggagatcaagaccatcctggctaacatggtgaaaccccgtctctactaaaaaatacaaaaacattatccaggcatggtggcgggcacctattttcccagctgcttaggaggctgaggcaggagaatggcatgaacccagaaggcagagcttgcagtgagccaagatcgtgccactgcactccagcctgggtgacagagcaagactccatctcaaaaaaaaaagttaaatttgaaagtagcaacttgtaaaccaactatgacccatatatacgtaatttgtttggctatgacccatatatacgtaatttgtttggctctcatagtatggaaaaaattagccaattttaaattgggagatttcatagaacttctggattttcacttgtatctaacttaaaaataaaagaagtagcaatacttagcttgtattctatcatagcaagaatgtattggaattgcccattttagggaaaaaataatttgtccagtccactaccgtctatctttttttttttcttttttgaaatggagtcttgctctgtcacccaggctggagtgcagtggcatgatctcggctcactataacctcctcctcccgggttcaagtgattctcctgcctcagcctccccagtagctggaactacaggtgcataccaccatgcctggctaatttttgtttcttttttgaatttttagtagagacagggtttcaccatgttggccaggctggcctcgaactcctgacctcaagtgatctgcctgctcccaaaatgctgggctgcgtaggctcccaaaatgctgggattacaggcataggccaccgcacccagcttcagtctaccttttcttagtcatcccttagggcagttctcttcacccaattatgttatcctgacaaaagcatctgagtttatgacctctggtataattttataaggaggttgccctgatgcatcaagcatacataaatatgcagtcagattaaggtgtacttcaaataatttgtaagaaattctaactaaaatacatttaccgatgattaactttttgagaaccaattactataggttcatatcattcttacccacttacaccatgataggcttttgtgaaatgctggagagggatggcagtactgtgacttaaccgagaatccctcataaactaggatgtttaagtcaagattctcttggtgcaagtggtacaagtgagctcaactagcttatccctgtccactgccacatattgactcacataaccaagagtgcaggggtatctgacttgatgccaggctgtatttgagaaaccaaataatgttctttctctctctttttttctctgactttctcctctcaccctactttactctttcccagctctggtctctctgttggctaaattctctaggaaattccctccatagggtggtaaagacagccactaacagcaagtctagcattatattgtcccttgggacatagttgaagatagaaagagaactttcttcttagtggccataacgatcccagcaaagaaatgtagatattctggtctgggtcacatacccagggttaatttaacaagtatctttttagtgcctacgttgagtaaggctctagtgaggtgcttgagaacctcaaggaatccctgctttcatggagcttacttacgttatgggaaggggtgggagtgaatccaaagacaaacataataagcaagaaaattatatagtactctagaagtaaaaagtactacagggaaattgcttttaactgttaaaaaccccaccaggtgagaaaaaagccgctctcaaaagacaaaagagagctgcttttatcagaaataatcagagatgtagtgtaggcaaaaatgaagtgcttattatattagttctacaaatggagggttttactattgggaatatcatcacttgtgtctcacctctgctgctttgtggtggaaggtaaaaataaagaaagagactaacgccaagcatgaaatggcgagtatagcccagcagtaactccttgctgcgggtttcacaccacagtcatatagaacttctggttcttcggtctccatctttgcctatgctgttccctgtgccttgaatgctcttcctactaaccatcttgattttttgtttttgttcaaggttgccagatgggttaaatgcccctcttatgggcttgcaaagaacctatgtttgtccctctggcagggaaattatcttatttatccttgtctactagtttccagtagtatagctggttcagtccatggtacacatacagtctatgaatctgtttgatggctactttcagagacccatcatttccctgtcgttctccaccaagtgaaacattacgcccttgtgcatagtgatgctatgataatgttcccactgcttgcatttaagccctcagagatgaagacgttttcctgaccctcagcctctcatttgctcatgagttctgttccctttgcaagaagtggccttgaggagtatataggtttgtgtaaagaatctctgggtggcagtttagggagatggttcagagcatggcttctgcctatgtttgtatcccagaactgcaggttattaggtataaggccttcagctgttttatagctcttaataatagataataatagtaccttcagaaaactgttgacaatgacataatctatgtaaagctactaggatagtgtttaacagagtaactgcaccatagacatttgatattattacaattatgaggaggaggaggggagtaggaggaggaggaagagtaaaaagaagtggtggccaatcaaggaacagtagtatccaaattgtgttattgtggttccaagttgcaaaagtcctatgtatgtattatttcatttgactctcatggtcattctatgagatagtgtggttttcatccccattgaagagatgagtaaactaagactcagattgtgctttcctagacatttatctacacctgttagctgtgatcccatgcttttgtgattttgcctctctgtttctttgttcccaaaattccaattttggagtaatggcatgattggagaaacataagtttgggctaggggacactggttgtatgccccatgcctgctgctctggaccagccagactgggatggagcaacaggcatttgcttggtgcatgacccaggcctttacctgagagcagttttggagctaacccagtgcacaaagggccatttatttggggaactgtccaatgatctatttctggcagaaaagaggcgttgtaattcatcctattctgggaaaagtggcaccccccaaccacatgcagtggcactaagatttcccaataggacagggtctgaggccactcttggctcacctccagcttcccctgtcatttccaatcatgccttatgacatgcagtcatttatcttgaaaagttgtgccaggctgtctgttgcaattctctgagcaaaagatgaagggcacctggaatagagaccagagaccaggctgggcttgaaagtcggagacatggtctagacctaagtctctacctcatcttctgtgctgttttaggcaggacactttctctgtgcctcacttctccatgaggagcacaatgaaccctgtgccgtagtcagaaactcaaatgttcctttcagctgtgataggctgaataatatccacccaacagcatcaggtcctaatccctgaaacctgaaaatgttacaaggacaaagggtctttgcagatgtattaagttgaggatcttcacaagggaagattatctcaggttgttcagatgggccccaaatccaatcccaagtgcctttgtaagacaaaggcagagtgagattatacacgcgcaagaggagaaggtgataggagaatggaggcagagatttgtggccacatgcaagggggtactggcagctggcagaaacagacgtatcagagaatgtttcgtgtcctacagcttccagaaggagtgtggcccttccgacacgttgatgttagcccaatggaacagatgctgaacttctgacttccagaactctgaggaataaatttctattgtttgaagcccctgtgtttgtgatagtttgttatggcaaccataggaaatgaataaactgctctgtgactcaattatccctcaccttttcttgctgctcatctgctcagcaaggtttctagtctcagttggtgtgtgttcaaaaatagaaaaaggcactcatctttctttaagcctcatttagtctcgtgttctctattgctttcaattggcatgtgtttctgtggtcaccacaatgaaatggagcctcttccctctatatgttcagtttcttcttcttgttttaaccaacagcttccaatcaagtcttttacatcttttctgatataagtaatttagtagtcttgagagcatcaatttgtggtaaagaagattacctttatgttaatttagtagcactaaggatatgtgctcagtaaatacttatgagcactactgcgtgccagcacacaggcagcaccagggaatcctgggggtaacagggcacctgacaggagagacacccccagcatgttagtgttctccagagaaacaaaaccaagagggtatatacacagtatgagcatatgtatacacacatatacatatacatgtacatacagagagagatttattataagaaattggcctgtgtaattatggaggctggcaaatccagaatctgcagaaccagtgtcccagttggagttgaaaggctagaagctgctgtagaaccaggaagagctaacatcctagtttgagtccaaaggctggcaggctactataaaattaagaaccaatgtcccagtgcaaaggccatcaggcaggagaattctctcttagtctagaaagggtcagcattttgttctactcaggccttcaactgcttagatgaggcccacccacattatggaaggcagtctgtgttatccacttcaccaatttaaattttaatcccatccccaaacacccagaatgatgtttgactaagtacccgggcacctcataaccaagtcaagttggcatataaaactaaccatcacacttgctcttgtattactgccattctagtggagcacacacagtcatgctttttctatgtatgctcaagcttcagattgcggcaaaactctaattttccaagactgcagcagagtaccatgttcctgctgcgggaacatcctcactgaatattccctggcccgagcctctacaaggagttctggggaatgtttttagccctgagggcacctaataaggctaaacaatacagaactgggttgtaagaggtccctctgatttctctaagttctgccaggatatgcctatgcttaccttacccccagacaactcagagctttggggttcgaggagagtcttgaaggaataagagcattcaagaaaagaagaatattttaattgttttttctttgtttaattctgtcgtgtttattcttctgcatatcccaagtgctctctaaagaaaaaatagcagtaatgctaccaggatttcctccttccaatgcatcctctctcaagcagtgactcaatttcttgctcggaaatggtgcctccagccattggtggctcaggttgaaaatgtgagtcatctctgatgtctgtctttccctcagaccccacttctgggcattgtaaagttattaaaaatatagccagagttttactatttcttattacttcttccctgccaccccagtacaaagacaccattacctcctgcttagatgactgtgatagtccgcggactcctccttgctcctacatatacctctgcctcaaatccattctccacatagtgaccagagggattcttttaatacctgatatcatgcccaagttatccttgctcaaaactttccatattcagaagagtaaaatccaaagtcctctctagggcttctgaggccctgtgtgatctgaccctgtcttctctgagacctaatttctgaccattctcttatctcacctgctctgccctagtgacactaatctccctgtcattcctctaattgcgttgacacttctattccctcattctcctttctggttccagcctcaccccttcagagaggcctttcctatcctaaccaccccaactacaatagccctcatctttttaataggcgtccctgtctgccccttcattctgctttttcttcagagcacttatgactatctgggatcatatgtctgtctctagatctagatctagttgtcggtttacttgtgtgtcacctttctcccacactgaatggtgagctccatgcaggcagaagacactacttatctccatatcacagcaccccaaatagtggcaggtacataatggtgatcaataaataattaataatggaaaagagtaaaaggcagggagtaagagcagtgtgaaaaactttaagcttcttctaacctcaagagtctgtgagttggtgaagggcccagcagcccaggtcacctaattactgttataacaagtttgatggtatcaggcaattcagttggtgcttcttgtttgagattgagttgatttttcactccttggtccttctctgtattggcagaggaccgcagagcaaggtggccaagagactcctgtgagcagaagcagggaatgttcacgctgggacggtgctcctgttgtctgtctacgatggcagccccccttttcattcatgtggcaactttaaaaaaatatttgctctatcaggttttgtctaactcttgcttcctccttaagtcctaggttacatgttcattactcattaacagcttcctggtgcccagactaggttagatcaccctgttctgagctcctatatttgcctttcttagcattcatcacatactcgtagacatttgccatgagctaccttccttgtcagcctgaaggcttcaaaagtgaccctgtctgctgtgttcatcactgtacccagggggagtgtcaaaataacagaggcctagtgagtgctctataattgtttgttgaactaacaattgaattttatgataaacaacaaaaattaacataaattataaaataatttgatgattgcttatcacttccttgatacctcatcaaaacagtaccacacttatttggatgttcgttcattttgtattcagcaggaggtggtggaataggagattaatgggacatttactcctagaaataatttaattattacaaaaattttccagaaccatcaatctgtagaaaccatccaaagaagaccgtgaatcggattttgttaataaaatttttggtatacagatcatgatcttttctagaagtgattttatcaggaaattttaaaataaattttatccttaatctttcttgaaaactaacccttttattttcctaccaaggaagataaagcgcaactgaatatagagtgggaaaaattagaaccagctctcatgttttaaatattctttaacttctcaatttctcttccaacagagtagaaataattatattctcaggatttggattaaataatttgaacagttggacatttaatatgtgaactgttcataagcatgattgtatcacacagtcggaaaatgaataaacttttataactgacagaattttctgactcatatatttaaacccaatgctattaacccaccaaagtagaaataacattctagtagggctatgtatccatactttgaccaatcagatgcatttttggaaaggctggggctacaggtttacaggaaggcatcaaacaaagcaaagttgagctgcatgcactggaacaaaaccctcgctctgatgccttaacactgtgttctaacgatggcccagccagcttaagacaaaagcagccatgtgtcttatcagtgcctcagcagctcttgctaggaaatgccacagcttgtgaaaccacagcccaaataattgggaacagaaaggagggagggtgatctacatttttatgttgggagggattaagatcatcggagcttcagggagtgttttatgcagtatttataagtttatgacatgtataaagatgtagatgtctgttatttggaggccaattatccatataaatgatatttaagctgtattctttgttttctgagtgaaacttctggactaaggtctgacagtgagcagagcattggactgcagggctatcctgcaagccaggcactcaggctcacctctccttagcattcctctactttttacctttgtgtgtgccagcagccagaaatggggaaaggaaaggaaatctaaagccatctgtttgacttcttgaaaacatgtaaattccagtcacagggccaactgctgctataacagattatcacaaactcccatggctttaaacaacacaaatttattgtcttacacttatcggggtcagaagtccaaaaatgggtctcacagggctaaattcagcttcttagtggagctgctttctatggggtgtgggagataattcatttccttgccttttccagcttttagaggctgcctgaattccttggctcttggccgcttcactttgacctctgcatccattgtcacatgtctctctggctctcccttcttcctctttcacttctaaggacgcttgtgattagattggactcacctggataatgaaagatactctcccatctcaagatcctccttaccttaatcacatttgcaaagtcccttttgtcatgtaaggtaagaaattaacaggttccagagatgagaacatggacatctttaggggcccattagtccaccagccatagaaagcaatggaaattactcgagtctgattttgtcctttccttccttttctcatgaccaccagaatctgcctggtgtttccaagcctgagctgtagttatgtaggattccccttacaaatgcaggttccactgaatcttcagacctccacccccaaccaccgcacatccaagaactcacttcctctccaggcattggcccagggccacatctatattagtataattctcactagtgtttcttattaaacatctcacttctgggcacatgttgggaggacaattggtggcctttttgtgggtggaaatgttcatgcaactagttctggccaatgatttataaatgactctaagctgagcatttcattgatggcatgaagatcttctagcaccttctctcctccctcttgttacattgatcagcagcattcaagatgggtagacttgcagttaacatgcagaataaactggaagtaaagtttgttgtagccactaatatgttggaattgttttttacaacagcatataaactaacttatcctgactgatgcacttagcaaaggttaaaaggaaggaaactagaagcataaacaacacaagctgctgctaactggttttctccattcacctgtctccttgtgaaatgtatatgataatatacctaaagacatcattcgtcacatgtaattgcctctgtctcttcttcatctgtggaaatgagaaaagatctgcagatgtgatgagtaggaatgtcggagaagagtagtgggtggtgctatgggcatttagcaatgatcactctttttattttttgcagtaaaccctcaaaatggaaatatgcttattttagggcaagcacagagtggaggagaatttgatggaaatcacagtaggaagagaagtatacagggaaagaaaggttgaagagaggccatgccagctgaccatagcccagggtgtctgcacactgcaggcactcacacctctaggtgccttgtttttgaactctttggatgcccttttaccccactcttctccctctcagccctgctagaacccttgcattaggccagtaattgggattaaggcatagctcccaacagctagagatggaacctccagcccagtgccaggggtacagcaggagtgtcagttgcctgcagattaaaactggactttaaatgcatatttctcagaaatgttattatatcctgtgttacacattgctagagtttctgtatataccactgttagagcatccagttcttcagctgggttgtaagtgagttgtcagtgacttgggctcctgtgggccagcctgagaatccagcccccagtgaagagcattgtttctatggcaacctgcaatttgtgacccaaatatccaggttaaggttttcctattttatctaactgaatgtatgagtcacacattctaactgaatgtgtgagtcagtggggtttcccaatgttcaattaaaagttagggttctcttttaaatatgtgtatttttttcacccagataatccatttgtgtcagcaataataatggaagacctttattctaaaatgtctgtgtttaggtagaaacttctgtgatggcagggttagtcaagaccaaaatggacatctttcttcagcaagtagttcatttgcttttccttttatttcttaaaaccctgcagggcgagccctgctgagacttactgacaaaaagctcgagcgaatggggattgcccaggagaacctccggcagcacatcttacaacaggtgctccagctgaaggtgcgagaagaagtcagaaatctacagttactcacacaaggtaccctattgcttcctgatgggtggatggatggggagattagaagaaagaccaccttactattaggacagacaggagtcagggagaatttgttattgtttcttcacagaatttccatcatagaaaatagtatacagatttaagattacttccctttgaaaacttttttcatagctcactagggagaaggatgcacaaataagtaatggatgagcaaacagaattacctgagctaacttcaaggtggtcacgtacagttgtatggattgtgtactgcacaaccccagagaataccagtcacatcaatcagggtacgattgcactcactagagttgtataatgtgcagcctgcacaactgtacagtccagctgtagctatcttcacctgcgccaattgtgagggcgctttagcatttgagtgattcaatagttacgatgaccagtgatataagtggagtttttgttgtatttttgttttgcttttcaccggttagtgggagaaaaacattttagatatgtattactatacatgaatgtattatacacacacactttagagattgtaagaaccccatttagcttcttgaaagtggaataatttttataatagactatagtgaatctaaaactacactgttaagagtatataattcttaacaggaattataaataacttcaatatgatgagagcacttaagatctcaataactgtggaagtgacaaaataaagctagaattcgaagaaagccttaagttacactatatgtaactgatatgtctacatgagatttggatgctatcaaccttcattggctataaactttatttgttttattttagcgtccattgtacatcgttttaaatgaaaggatgataaaatatgtgtttttgagagccttgagtatttgtcattctgcagaatattgtaattgcatgcataccgatattggagaaatctgggtcagccaagtttcatgttattgcatttagattaacctagtaatagtccatttgcctagaggaaataatgtgctccctgaaagatgactattctagaaggataaatatagatttcaagtgatcgtaaaatagtattgtttgtctcatatgcattatttgcattttgtcctcagagatttccaatggtgaatttactggtatactaagtgatttaaatttgaatgtgaaatactgataggcttttaagcttcttttaagaagtagatagaaatacgaagattatgataagaaagtctgtcacagtgctatttggaaaacggaaaatttacaagcaacctagaggtccagcaatgtgaaaagaatcaagtaattctgcttaaattcataagattcagtataatgcccagttattaaaattacatctttaaagaatacatgacaacatgggaaattacgtaagtcatacaaggtgggaggaaaggtcatgtgtaaaattgtatgcataatataagcccaattttgtaaaaaccatatattcttatatgtacagaaaaaaaggactgcaagtaaatatgccaaccattttaataaaggatctctctggattgtgggataagtgggtgacttaaattcttatttttctgtattttccaaatcttctgcaaattcatattacaattataatcagaaaatacacatatgcatttttttaagcttcaaccacaagcatagctgcccagcttctgtttagtgtctggtttttgcagctcattctttttccctctggtgatgatctatatagaatgagacctaaactcacatgtgacgcattatgtgtgcctttgactcttttcctctactaatgtcagcctgcagtgtgtttgctttggagaatcattttctacagctctcattgccctagatgcataatatataagatttttcctaagatagtactcaggtctattaagctaaatatacatacgtgttctgggaagataatgcccagttcagtcctttgaattcagttgttgttgtcactttcttgagctttgaaaagctgtacatttttaattctttcattcagttccctttggaaggccgcattgttctctagctcttgggtattttgtctgtgctgatattaccttttttattgcttgttctttacataggtttttggttttggttttggttttttcaagacagagtctcactctgttgccccagctggagtgcagtggcgcaatcttggctcactgcaacctccacctccgagattgaagtgattctcctgtctcagcctcccaagtagctgggattacaggcatgcaccaccacaccaggctaattttttgtatttttagtagagatgaggtttttctatgttggccgggttggtctcgaaatcctggactcaagtgatctgctcaccttggcctcccaaagtgctgggattacaggcgtgagccggttcttcacatgttaatgctcaaactcatgttatgtcaggcatccttcagaaaatacatagccttattgaagtaatagtttcttttttaaaaaaaaaaggaaacaaaattgataagttgtttttatgttttatgattaatagtagaagttgtaaagacagattagcgttaaaatattttgggtctaggtttgctataataaaaatattagaatttcattccactcaggtgaacttattagtttaaaatatatatcatatagaaattcaccataggggtaacagatgtttcagtaatgaatatttgattcttcatctctgtaaatattactcagcagaaacaatatgctgaataagtacaaacaaagactttggaatgtttttggaaatccttgggcttccctcttaaagagggtgaatcacagttcttatccatagagatggagtatccttccatggctcacgtggggctgtcactctggtgtaatgcatttaattgtttgttgttgatgattatctaacatgttcaggctgcggtaacaaaatgccataatctaggtagcttataaacaacaaaaatttctctcttacaattctggaggctgagaagtccaagatcagggcgccagcagattcagtgtctgatgagggcccacttcctcacagatgaccttctaatcattgtaatgtcacatggggtgggatatctgtggggctgcttttacaagagcaccaatcccatacatgagggctgcacccccgtgacctgatcaccaagcaagggccccaccgtccaataccatcaccttgggggttaggatttcaatacataaattttgaggagacataacatttagacaattgcattaatatttaacaaatatttactaaccaacgcattttaagaagagttatcactttcaaagtccatttttgaggaaaggaatttattttaaaaatgattgcgtttcttaggagttttcttcttgcctttggaggcaatttcaaaatatagtttcttggaaacaacttaactgtccatcttgaggggaatagtgaattaaataatggtacacccaggcattggtgtactcttagctacaaatacgagaatgaagaatactaatatggtaggatctctgggatgctatgagatgagaaaaaagtaaggtgcagaacaatgtatactatatttgaacaatgcgtatagtatgctacatttgccaaagaggaggaaataaaaatgtatatccatatgtgctttgttttaaggaaatgctgaatgatgtacaagaagctaatacaagctgcacctgtgggacagggaatatggtggatggagagagggtgtgtgccttttatgtcactttgtttgatgaaatgtatgagtatattaactatttaaaggaataaaatttttaaaaagaaacaagaaggaaaaagggtgaattttggcatcagacaggcccaaattttaaatcctgtacctaacacattttgctgtgctcaccaaatagggatgttgtaagaattaagggagctaagatatgtaaatcactcgatacagtatgatagtaaatgcagaatattgttggctatcagtaatagaagccacgcaatttaatcaacctcatacatttataataatccttatttttataacatcttcatagagatataattcacataacatacaacttacccacttaaggcttaaaattcagtgatgtttagtgtgtaaagagagtggtgcaaccatcacaataatttacatatgcgtataagagaggatgaagaggttaagtaatatactcatagtcagacaactagtaaaaagcatagcacaggtctgtctgactccacagcaaacttttacccattacgctttattgcctttattatgtcaaatgggctaataatttccatctccaggtggttgttaaatgagattttatgtagaaaccgtataatagagttcattgcatattctatgacagaggttggcaaaccttttctgtaaaggaccagtttgtaagtattttagtctttgcagccatatggtatctgttgcaactacccccactaggcaaaacccaaccatagacaatacttaaatgaattaggcatagcagtgttccaatacaattttatttacaaaaagaattactgatacacatcaaaggaaacaacagagtgaaaagacaacacagaatagaaaatatatataaatcacatatctgaaaaggggttaatatccagaatatataagaaacgtctataactcaacacaaggggaaaaaaaaacaagccaaataataaaataagcaaaggattcaaatagagagttctccaaaaagggtatgcaaatggccaataggcgtatgaagtgatgctcaacatcactaatcattagagaaatgcaaatcagaaccacacatcatctcacacccattagaatggccactaccaaaagaacagaaaataactagtgttggcaagaatgtagagaaattggatcccctgtatactgttagtgggaatataaaattgtatagccattatggaaaacagtattgaggttcctcaaaaaactaaaaatagagttaccatatgatacagccatctcacttctgggtacatatccaaaagaattcaaagcaggatcttgaaataattgtacacccatgttcagtgcagcattattcacaataggcaagagatagaagtgacccaaatgtctatcaacagatgaacggataaagaaaacatggtatatatacaaaatgcaatattattcggcctttaaaaagaaggaaatccgaccacatgctgcatgataaacctcaaagacatcgtgctaaacaaaataagcgagtcacaaaaggacaaataatgcatgattctactcatatggagtatctaaaatagtcaaaatcatagaaacaaagtaaaaaagtggctacaagggcttggaggaggaggaatttgtgtttcatgtacaagtttcagttttgcaagatgaaacctcatagagatctggtgcacaacaacttagatatacttaatatgactgaactgtgcgcttaaaaatggttaagatagtagatttagtactatgtggtttttaccacaggtaaaaaaaaaattgctagcccattgtttgtggacccctgctttacgaagtaaaaaaatgcaagcttttgaaatcatcatcaagattattatttttattgttttattttctcatgctgtagtgtggaactatttttggggtgtcccttttagtgactttcttggctgcaaatacgtagaaagtgtaaaaatatatcagcaactatgagggttgggtaaattcaggcaatagaaaacagtggcaagtaaggcagatgtgagtagtagatgctaccatcctcatatgccttcataattattccctataagatgaaaaaagaatagtatgtttgtttaccagggccagttatagctcattaaacattagtgtttcctgaagaacttttttcacattgtccaaatatatgtgtcaaattttacttgggaattgcataaccagatggactttcccaaagctctgtcttttggaacaacaaaaattagaaacactactttctaatccaagaagactttttagaactatatgtacggactagctattttagtccagtcacctccgcaatgatacttcagcaactcaagtaggccatctgaactgaagtaggccatctggtccaccacctttcttaaagaaggaagtctttgtagaatggagcaatagacttgttgagatattgtccagtctcattttgcagatttgggcaccaagacccaaagaggattagaggtttgttcctagttacacagctagttagtggcataactgagactagattgcagttctcctcattcccatgccagtattctttttatctcattgtttttattaaggtatattctgtattgcatacagtaaaattcaccatttttagtgcacagttatgcaagtattggcaaatgcacacagttgaataactaccacaacaatcaagatagaaaatttctatttctccagaaaatactctcccaatgctccttggttgtcagctccttttattactaccagcccctggcaacctatgatgttttccatccctacagttttgccttctccacaaagctatataaatggagtcatagtgtctgacttctttgacttctggagatggatttagacttatcaaagctgtgatgtgtcatcatcccattcactttcattgctgagtattccactaaatgtattaggttggtgcaaaagtagttgtgttttttgccattatttttaatggttaaaaactgcaattacttttgcaccaacctaatataaccacagtttgtgtatccatcccccagctgtgggacatttgagttgtttgcaggtttgtttgacacaaagaaagctgccataagcactcacacataggtttttattataaacactgatttttatttcactaaaaaagtaaatatctagaagtggaattgctgattggcatcttaaatgtatgtttgacctcataagaaactgccagagcaatattcttaagatggtggaaaaagaagaaaaacagaattagagactggctttaatacatatgaaaacaatgggagatttctgaaaaaaaaaaaaaaaatactgcatctttgtagaagttctacctagtgcttcctggagccatcagtatcattaggggccccaatttcctgagaatctcaggtcaaacatgtttactgttaactcatttattcaaagcaaattttctcagtatctattgaccaggcaataggatatgtctttctacaagtgacattgagaaatgcttccttttgtctctcttctgaggaagagaatcttcttgctcctgagaaagaaaacatgagccagtcagattcctttttatgcatatgtgaagaatgtctgatgttctaattttctagtatgtctcaaattatgctacttgaatttccaggctctttcatgccttttatttagttgaggctttggtgttacaaatctgatgttcacatgccagttctcttcaacacagttcttctgctttatcattggatagcatgagcttttccttgccttggtgctcacatgttccatgtacaggatattgactctctcagttctctttctaatggcctctctcaggctgttggcaaactgccctcttctgccacgtcccaaatattgattcctcctgggggtaggtcctcttagttgttggcattttgcatgctgcctggacaatctcaccctctaccgcttaagcatcccctacttcatagtgactctcagatttacgttttagacctctctgaaactacagattcttatttttctctctctaaaagatgtgtacccctgaatatttctctgacatctcaaatttaaaatatctgaatctaacccattatcttttctaccatctcccgagtctgttcttcctcctgtgttggttctcaaggttaatacctccatgactcacgctgtcacctgtcatggaaggctcagagtcacctgtgattactccgttttcctcatcactcacatggagtccatgaccaaatcctcagagttctgcttgtgaagtgagtttcccatctttcccagccttatctctaccctaaccactgtgttaattcattcctcttcagctctttcccaggccatttgaataacattctagttatcatttgatctgaagtctctgtcctgctccctcaattctacttcaattaacttcccacttctattgccagagttaaatatatttctgacaacattatttccatccttaaaacattgaatggttcccaattacctacagaataaaagtcaaactcttcagcatcgcacagccattctaggcatttcatggatgtattaactttggacaagttgcttgtcagaaattaagatatcttcattataaaaatgggaataagatctatttcacaggattgttatgaatattgtataataaaactcatgaaaagacatagccttgatgaaatattaactcttctgagaagacttacctcatctttcaggcagaaccaatcattctcctatccatctgcatttcttttttaaaaaaaattttatttaagttccagagtacatgtgcaggatgtgcaggtttgttacataggtaaacgtgtaccatggtggtttgctgcacctatcaacccatcacttaggtattaagcccggcatgcattagctatttttcctgatgctctccctcccctcaccctccaccctgacaggccccagtgtgtgttgttcccctccctgtgtccatgggttctcattgttcagttcccacttatgaattagaacatgaagtatttggttttctgttcctgcattagtctgctgaggataatggcttccagctccatcaatgtccctgcaaaggacattatctcattcctttttatgtctgcatagtattccatggtgtatatgtaccacattttctttatgaagtctatcatcgattgacgtttgggttgactccatctctttgctgttgtgagtagtgctgcagtgattatatgcatgcatgtgtctttaaaacagaatgatttatattcctttgggtatatacccagtaatgggattgctggggcaaaggatatttccagttccaggtctttgaggaatcaccacattgtcttctacaatggttcaactaatttgcattcccaccaacagtgtaaaagcattcctgtctctccacaacctcaccagcatctgttttttcttgactttgtaataatccctgttaggactggcgtgagatggtatctcactgtggtttttatttgcatttctctaatgatcagtgatgttgagcttttttttcatgttttttggccacataaatgtcttcttttgagaagtgtctgttcatgtcctttgcccactttttaatggggttgtttgttttcttcttgtaagtttgttttcttcttgtaaatttgtttaagttccttatagattctggatattagaccttggtcagatggatacgtcggaaaaaatttctcccattctgtagattttctgttcactctgatgatagtttattttgctgtacagagctctttaattagatcccatttgtcagtttttactttcgctgcaactgcttttgacatttttgtcatgaaatctttgcccatgcctatgtcctcaatagtattgcctagattttcttctacagtttttgtagtttgggattttacatttaagttttttgttgttgttgttgttgttttatttttgtttttgtttttgtgggttttttatattttattttttttgagacagagttttactcttgttgcccgggcgggagtataatggcgtgatcccagctcactgcaacctccgcctcctaggttcaagcgattctcctgcttcaacctcctgagtagctggattacaggtgcccaccaccatgcccagctaatttttgaatttttagtagagatggggtttcaccatgttggccaggctggtctcaaactcctgacctcaggcaatccaccagcctcagcttcccaaagttctgggattacaggagtgagccactgtgcctggcctacgttcaagtttttaatccatcctgagttaatttttgtataaagtgtaaggaagaggtccagtttcaattttctgcatatggctagccaggtttcccagcaccgtttattaaatagggaatcctttccccattgcttgtttttgtcaggtttgtcaaagatcagattgttgtaggtgtgcactcttatttctgagttttctattctgttccattggtctacgtgtctgtttttggcccctctgcatttcttagcactttgttcagactaataatactgtattcatcacatagtatccattattcttccatccggtgtgctccacactttgtgtgaggtactagagataaaaagggagtgcccattctagcaataaggatagaatgatgtatgccatcatagagacacatgatagtataatgatggcacagagctggaactcagcctcacttgggaataggtgggataaggaagacttgccagtgctacaacagatgagctagtttttaagggataaaaatgttaacaggtgcacaaagggtggcagaaagggaagcctgtataaaagcaaggtagtgctttgtcttccttgtagactatgagcaaacttcagttgtgttctaattttactttgcatagtgctagcgagaggtggatcctctgtatgtttttgctaatataaatttaattgttgcccttttctctcattttcttcctctatttcattttccactaaatcttctcaaagcagtgaatgcaatatcaattttcatggattcacaagaaaataaacgtagctacaaagccattttgaatcatctttcaccatgagcaacattacctaggatctccttttttaagaatctcttcattcccttgtgatctttttctattgacccatcaagtaaagacaatggcaagggctcttaaacataagccactcacctgctttgagtggtttcatctaatattttcagtccttaaatgttctcctgagtgacactctccagtgattgttaagtgaaccttcttctatgaccatgagctcagcggctaatggtagataaggattttggatgagtaacctaataggaatctgaacagattattcttctgtagctagggtcttttgttactacttcttcattcaaccttatttgattatgatctgcgaatcacgtgtcccttctcaatttcctccaagtccacattttctcgaactgctacctccttaagatttcccccgacacatttcaaaatcttcgcacccttgcagaaatgttgtggccaggaatatttctaattttatcaagtctttaagccatcagagaaattctccttggaatgagctttatatttaaaggccaaaagacatgttttttgagggaattattaaaatcatatgtcagtttatcagtagcagttagaattatgagatgtatatcctgattagcatcttttcctgtttcgtttttattctgggaatccattaggtcatttaatccaagaaggagttttgtttaaggcttgacatggactcatgattcttgtctgttacattgttcatggtagaaaaatatctgccttttgtagcgcccctaatggttcctctagccagcatatgggagacatgtctacacattatttgtctaatatggactttttctatcaggaatgatccttgtcattgctgcttcacagctcaatgttttaagtcattctttgcatactgatgagtaattttagggaacttcagagacttcaaaaatgcttcatgtctgcccctgcagaactcaccaacctcaaatgcattgaccactttgcatttaaatgtactaggtgaaacaatatatgtgatatctcttgtttggacaatttaagatggtcataaggttgcattgttatgtcaccttgaccttgtggcttgactgtggatttgaaggatcttaaattactaatgttacattgaagaaagatgagttacaggttttcaacaattgatattggttttattcttgaggataagtatagaccctacagtctaatatgtgcggtgttcaaatgtcctatgggatttttagagagtcagttgatttagaacattgacatgtggactggataagaagaaatcaaagccactttcagagatgcactgagatgttctggcttttctaagaagaaacagaaaaatatgccatctgtgtgctttaggacttctgtccctaatattgcatattaactaatttctctgtggccttttttggggggaccaccaattctcggtgtctggcaaaaacccctgtacagtgtagatgttcaagcctcccattgtatcagaatttctacatgccaattctagaaggtaccatgtgcatagactacactgtgaatggactctaaagttgtgcagccattggtccagtcttgagccccagacaagaataaagccttctatccttatccttctctgaaataatacttccattcttagtatcccccttttcattttgttcatttttattttattttattttattttattttattttattattttattttattttattttattttattttattttattttattttattttattttattttattttatttgagacagagtttcactcttgttgcccaggctggagtgcaatggcgcgatctgggttcactgcaaccttcgcctcccagtttcaagcaattttcctgcctcagcctcctgagtatctgggattacaggcatgtgccaccacgcccagctaattttgtatttttagtagagacgggatttcaccatgttggtcaggctggtcttgaactcctgacctcaggtgatccacccaccttggcctcccaaaatgctgggattacaggcatgagccaccgtgcccagccctcattttgtttatctttttacagtagcaattatacaatcatttatttagtaattcaaaaaacattgagaacctactaagtgtcaactactatttatatgctgtatgttagggatacagggatgaatattaaattcttgcctttgaagtcatgttaaggagacctatatgtaaaatattatagcacagaaatgtctgaggtgtgacagaagtgtggatgtttgcagtgtcatataggaagggtatccagtctagaagaaatgtgtcagaaaaggttacaaggaaaagtgacctctgaactttgccagctattagttagcaagatgtgtttatttcctctttagtcatcaaacacatataaaattgccaaagtgttaagagctctagagaggtacagcatgttgtgatagtatatttactataaaaccgtgtatttgctgagtgcctgctttgtgtcaggcctttactagcttttggcaaaatatgataagcaagatagatatggttcttatatacatggattttacattttagtggagaagacactcatccacaagcaatcatagtaacatggtggctgatatgaatggggtcattaattatgctttggggagcaagtaagcagagggacttctctggctctaagggatcaggaaaatctccttcaggaagctgagatctaaaagaggaagaagagttagccagattaggtggtgcttggcgactatagaaagaaaatgtcccagttgcaaggaacagactgttctgaggctgtattagggttcttcagagagaaacaaccaatagggtatatatagacatataagaggagatttattatgggaattggctcgcatgattttggaggctgagaagtcccacgatctgccatctacaagcggaagaaccgggaaagctggtggtataatttagtcaattctgaaggcctgggaatagagggagctgctggtgtaagtcccagagtctgtaagcccaagaatcagtagctacagtgtccaagggcaaaaggagatggatgccccagctcaaggagagaacgaaacaagttgtccttctccacttttttgtttcgttcatgttctcaacagacaggacaattccacctacatgggtgagggcagctcctctttacttagcatgctgatttaaatgctaatctcttctggaaatacccacacaggtacacctagaaataatgttccaccaactatctgggcatcccttatctcagtcaagttgacacataaagttaactctcacaggggtgaaggttgaagaagtttggtgtgttccaggagcatgaagaagcctaatatagttagagggttaggagttggtcagaagggagggaagatggcaggaagtgagattggaaaagtaaggaaaggactggaatgtgaagtgaatgccttatatgtttgcttttctcaaggaatctagaatttatcctgaagacagtggcaactacagaagggttgtgaatcatagactgtcctaatcagatttctataacaaaagatgagaggatgcactggaaaagcaaagacagggggcaagacatctagttaggaggctgttgtggtaatctacacaggatatgataacaacctggatgagggtggtggcaaatgaggatgaggaagtcatcctcatccccaagagaaaaggagactagacaacccatggtaatagattgaaaaacggtaaaggagagggttgtaaagattcatccttcactcctcttcaccacattctcctcccccaaattcatgaccttcttgcagcagaattgttttgttttacttcttccaaatggagattcccagaccttatcttgaacctgacaaattagaccctcaggcccaggcactggtatttttcacagcttcaccgcagttgacttctgtgcatgtgaaagcgtgagggtctgctgtccagctctatgcagattcagagcccacagcactccacgcagcactcagagcacaagggagtatctgagtcaaactccttttggccttaaggagttcgcttgtcataaccaggtgaattcagaaggagttttcagctcttagggttcctaaaggtatcctatcttaaaacccaaactaggatggagcccatctaacactatcacctaaacttgcaggttatgtcttcaagacctaagaaagtagcccaccctccatagttctcaggagacagcactgctgaaattccacctcctatttccccagaaatatgaaataagttttcttaggcaacccccaaaggataataaacaagttactttacacagagactctacaatttcctgtgcttggcaggtataagggcaaagttatcatggtactacctcctgtgaataaagaagagaggaagaagagaaagaaagatagttgcttcagctctaaaaggtcggttcggggattcgtattggaaaccattaaagtctcagagttaggtagcagttttctgaattattaatatctaacattagcattagatactagtttttatttctatataaagtttcccaaatcttcactttatcaccagtggaagtctggagctaatactgattgtggacctgtgtacacacttcacattttattaataaattctgcatttagttcacacagtaattttgcaaagtagatgtcatggactgcattctacaaataaagaaaaggaggcccaaagagccacaatgcctgccaaggccacacagctaaaaaatattatttctattagtctgaattcctggagagccaataagaatgtatgtatgtatagagaaggaaatttattataaagaatctgctgatgttattatggaggctgagaagtcccaagatctgcagttggcaagctggagaccaatgaaagctaatggtgtagttccagttcaaatgtaaaggcttgaggaccaggagagcagatggtgtgagtttcattccaaaagctggcatgctcaaaactcaagacgagctaatgtttaagttcaggtctaaagacaggaaaaaaaaacccagtgtctcagctcaaggcagtcaggcaaaaggagttccctcttactcttactcctgggaaggccagcctttttgttttattcaggcctttaactgattggatgaagaccattgacatggggagggaaatctgcctaactctatttaccaattctaatgttaatctcatccataaacaccctcacagatacacccagaaaaatgtttgactaaatatctgggtaccctatggcccagtcaagctgacacacaaaattaaccatcgcagtgtgtaagatgactaattgcctccaaagcccatgctctttccactcccctatctgcctgctgtgaagtatttcttatttcaaaaatacatgtttttcttttgcaagaaactcaagatgcacttaaagaaattaacacttgagactattcaaataaaagatttaatagcttgcttatcaaaacatagttatcaccctccatcttccattttgcattttttgggctgctaggaatatgtggtgtatggttttgctgagatgtttcctgcatacctgagctattgggtccctaagaaatcaaatttgtttgtttttcaacttggcatcataatgaagcagagatgtcagcatagcatttcttagtgctgccaatatcttgagtaatcttaatcttgttagatcaataatgtgaaattttgctagttgccattttaattgatttaattgaaattgatttggcataaatgagtggacagaaatttattaacagtgaccatgagggtttgaagtatctgctatgtaagaagtatgtgactttgatttatacatctaaaggctccctctttccaagttctattagagaaacaaacctaatgtttagtcctaaaaactattaaacattggtgaaggtagtatatggagattctgaaaactaagtatttgggtattcatttcagtttatcccatttctatcatgtggttggttgttataattcacagttactgtaaactacatatgtgtgcatttatccttatgtctatgtatcagaaaatttgatttttcttttgtcatttgtgtccctaaaattcagacaacaccacagaaacgaggaagagatgaaataatagagcaaattttattgacctttgttttatatattttttaaattaattctctcctaacacttggatatttgttttgttacggaaagagttttactataataattttggtctatcaggatttgacatgtattaaagcataaataaatggtctctaattttcttgctatttttgaaattttaaatatgcactaccttttgtgcttccctgttccttttcttctccttttcttttcaattctcttcactgtccctcccttcatcccactccccacccccaccaaagtgctctatcactgaagaccttccgcagcccatggaagagctattagaaatttattaagaaccaatttctgcttctttgtcagggacaatcatttgttttagagctgattttctgccttaattaaatgaaaatgtcactctgtcaaatgaattcatttatatttattaatccagttctccaggcttgaattttctagtagggacttgggctcatcatatttgctcatagaataaactgaaaaatgtctcttacatcaatttaaaagactcacaaattattgctccaccctgtataagtactatataaacaaagctgtgattaacaaatgtgtgaatgattttcttgtgtagatgctatctaggtgcatataaatatacatatttggttatgttgttgcacacacgtgcgtctgtgtgtgttagggcaggaaagtgatgaatatccattactgcggtgccttagtactttaagaaagtgtcaaaggtaacattttagccacctgtgtgtttttatttgccttttcaaaatgctaattgatgatgcaaagtttaagtgctactcagtctttccctccaaaaatattaaaggattacttattgagtatggtctttgtatctaacattgtaataggtacttaaaaaaattaaaatggaataaacatattcattcactcattgaacagctttttttgagttacctactatgtgtccgatgaggtagtgggaatcagtgatgaacagtgcatcctgaatccatgcttttatggagcttacagcatctagctcatagtaggtacttggcaaactgaatgagcaaattagtgaattaattaatcttgcaagagaaagagacagcagactgataattattaagttattaattgcattaagtcctcaaaggagaatgtacagacttgagattgtatagtggggactcacaaaggcaggagttggaatcagggagagtatttacaaagagggaacaatgatgttaagatattttgctagagcagggggtagttgtgaggtgacactggagaattttgccaaagctagaccaccagaacatttaggtcatattaaacatgtgggccttaaccctaagaactttagacactcgtggaagagctttaagcagagatgtgacatgatcaggtttcattttgagatttaaacccttccagaaggccagcacactagttcttttaagctttctgctctgtttctccagaacacatactgaaaggggtaatattaccttgaattcttcaagaaaaaaacaaatgcaattaaagaaattcttactggaatggtagaaactggcactgatgcctccctagcacgagtagagtttgctttagactttctggccatctcacaaccataaatgtgaactccttaatcatccaccctttgtggcaaaatccccgtgggtacccacagcatcttcgaggtcccttgtatacacattaccattttccttcctataaaaagcatactttcaactctacctttttgttttgtgttttgttttgtttgtttcgtggtttttttttttcttttaccttaagtggtctggagaaaaaacttgttttagaggactgcaaaattgagtttccaacaatgtaaacagtgacttcataaaataggcagttttagtctttaaataaaccattcttttgttttcctttctgtatcataataagagttaaaattatggctttgcagtttctattgtactgggagtcgattggtcccttgagttaacctggcattcaggtcaggaattgccagtacttttgtttcctcatcttcagaatagcttctggtagatactaagatttgttacagtaaagatatttgaaatacttattacttagactccagggagcccatcctattcaagccttggtcttagaaggaaaaggttgagaaagagttgaagaagtccctctttatcagtggacttctttgtgtattgataaagatgaccactgcccaggtggagcaaaaagtgatctcctgagcagggtaggagaatggctttgacccagagctccacctcagaccatgtaaggtcagctcgtagagtattcagttgaataaatgtttgctgaacacttattatatgctatatataggacccttcagcccagtaagtattgcaaaaccttagagctttaacttctccagtttttatcggaattggtccacaccccaggatacttagccacacatgaggccagggcaaatagcaacatcagtgataatcactatcatttattatatgtttattatgttttagcactgttctaagcacttttttagcactgtcattttatccttatacctctgtgagatgggagttgttattatcccttttcttctgcagatcaaacagctgaggcacacagaagttaaattatttgaacccaagtcacacagtataagaagtgatgaagcaaggattcaaacacaagctctctccaggagcgcgatgctcttagataccatgctacgttcgttgctataactgcatacattgggaatatagtatctcatcattgctttgtgccaggtgctagagttacaactgggaacacaatataaatggtccctgtcctaactgggtttggaacatggtgggagattatattagtcggctggggctgccatagcaaactaccgcagactgggtggcttaaacaacagaaattgatttgcttgctgtcctggaggctagaagtccaaggtcacggcgttggcagcattggtttcttctgagacctcactccttggcttgtctatgtccaacttaaccctgtgtcttcacatggttgtcactctctgtgttagacccaagtcatattggattagaacttatcctaatgacctcattttaacttaattgcctctttaaagaccctgtctccaaatatgttacattttaagatactagggattaatattttaacatattaattgggggggcagggaataattcagcccataacagagatagttgttaaagaaggagaatacacacatatatatatatacacacacacacacacacacacagtttaatgccataccctgtatcaatgatccattataactactacttaagtgttttctttaaagacttgttttatatctataaatggtctaacatgggatgtgttaacatattttcattctctgaataccaccattctctctcatccagtgaattggatatactttcatccctggagtatccatatactactctgaacatgctcagccaattagcagtctttaatattctaagttcagtgtgctcctaggttatatttattctgctttggcctctcttcctgtcatttattttgtcatctggtgattgcttttgatgcataatgacagaaaaggtgtgcaggggatagtgctaaaactacagtaaagaaacaaaaaaaagtataattatgggatgttaaaattcaaggcttatagagactcaaatttgcttttaaagtaatggctaaagaagcagaagataatggtaagtaggaagttaggaatgatctggacttcatgaaaggcaacatgagtatcactaccatctgaaattggccgctggttgttggaaaaaacctatggtgagagggcatgtgagacttaatgcgatttgaaagagtggttaccattgtccagtaccaagttgtgttaatacaacttacatactgctaagttgtattaagggcaataaaggaaaagtataaaatacaaagagcagctctaagttagactggggagtaatagttacctttaagtggtagtaagaaggagaaatgtggtctggccggatgaagtataggagaagagcaagcatatagttggaaaaacacatactaagctctgaaacaggaaagtttgttttgttttgttttgttttcagaagacagggcctcgctccactgcccaggctggagtgcaaaaatgcagtcacagctcactgcagccatgacctcctgggctcaagcaatcctcccaccttagccccttgagtagctgggactagaggtgtgcaccaccacacctggctaattttttttattttttgtagagatggtgtctcactacattgcccacactggtctcaaacatgggcttaagggatcctcccaccttggtctcccaaagtgctgagattacaggtgtgagccactgtgcctggcctgagtttagcattccctaggaactgaatgaaggccacaggttgaatcacagagcccaagagagagtcatgtggctgggacacaggcaaaggccaggtcctgtggagcctcaaagctacattaaggatttagaataggatccaagaagtgcaatgagaagccattaaagaatttttttcagtttctttatttttgacaacaatatttattttgggggtacaatgtgatatccatgtatagattgtagaatgattaattaggctaattaacatatccatcatctcacgtactaatggtttatttgtgataagaacatttaaaatctacacttttaggccaggcacagtggctcacacctataatcccagcactttgggagggcaagacaggagaatcacttgaggtcaggagttcacctaaagtaatatggtaaaccttgtctgtactaaaaatacaaaaattagctggatatggtggtgcatacctgtaatcccagctactcaggaggctgaggcacaagaatcgcttgagcccaagaggcagaggttgcagtgagccttgattgtgccactgcactccagcctggacaacagagcaagaccctgtctgaaaaaaatataaataaaatcaacacttttagcaatttgaaatatacatcattattaactgtagtcaccatgctgtacaatagatcacaacaatttattccttctgcttagtgggaaccctttgattatttctccctttcaatttaaacaagggagtgatgagatcccatttacattttcaaaagattgtactgacagctgtgtggagatggattggatgagagcagaaatgaaaccaaggaggtcagatagtccaattttgcagaaatgtagaagtgaacaggcgacagttaaaactgaggtcatagccagagcgaatgggggtggatctgtttgcagataggatcaatagaacttggtactggattgcatttgggaggagaagggcgctttaagagtgagtgcaggtggttggcctgagcagccacaaatgtggaggcacctgtgctgaggaagaagaagcatgaagcagagagttgtcctggaaatgagagaggtcagtttgagacatgtgaggtttgaggtccctttgaaacacccaataaagcagttagatgtctgagtatgatgctccagtgagggacctgtatgaaaatagaaaccgagcaatcattagaatatctgtgtcaagtatgccatcggagtggtgcggtcactcgatcactagacatttccgcctttcactcacattaggttttgtttatcatcaagtaagagagctgaaagtgcaggctcaaagtatcctgtgggtgcttccctccctgagctgcaggtgggcgtttatatatatcatgggtctcttctcatgaaggtttgttcgcatgaatatcagaaaagggcttgagagggaaaagctgtgctaagaaagactacgaaacagcattgcagggccaggtggtgccctacaccggcttccatttccagcattacttttgtcaacagtggaataaactatcacagagtggctcaccatggtcttgggagtcgaagagtctaagttgacctcccagcactgtccctcactccctgtataaccttaggcaaatgacagatctctctgaaagtaagttttcttttaagtaaaatgggagcacatatacctagctcagagagttgctatcaggattaaaagggatatttttgcaaagtaattattagcacagatctcaataaacagtatatagtaaatggttctacttctaagaacacgttctttgcggagattaatgtaaggatgaagaatgtattttataaggctattctaataaatcaaacactgaaattttgtgaaaattctcaagccagcaagataagagaggggatcatttagggtatacagctgtatcacttccattaaattgcttcagacacatgctagattttttgtcaaccagaatcacagtcaaaggttgtaccaatatctaaagacagttttcagcttttgtgaacaagtttagtgggtggtatatataagcttctatatacagatatgcatttggatctttttaataatttcctttgatcagactgaatagctggttggagaatcatttctaatgttttagaaaatttctttctgtgtacataaagaggatgttttacaggatagagaggatttttagttttttctgggactggaagaatcctcaccactactacctccaaactgtctagtctatccctttgctctatacctttgcgttaattattagtagttccttattttttaataattttttttccataagcttttggagaacagctggtatttggttacatgagtaagttttttagtagttatttgtgagattttagtccacccatcacccgagcagtgtacactgaacccagtcttttatctcctacccttcccccaagtccccaaagtctattgtgtcattcttatgcatttgcatcctcatagcttagctcccacttatgagtgagaacatacaatgtttggctttccactcctgagttacttcacttagaataatagtctccagttccatcttgctgcgaatgccattaattcattcctttttatggctgaatagtattccatcgtatgtgtatacaccacagtttctttatccccttgttgattgatggggatttgggttggttccatatttttgcaattgcaaattacactgctctaagcatgcatgtgcaagtatctttttcatataatgacttcttttcctctgggtagatactcagtagtgggattgctggatcaaatggtagatctacttttagttcttcaaggaatctccacactgttttccatagtggtatttttaaatgttctgctgagaaatatttatggttattatccaagtcagtatttttactaagtacctgctgggtgccaagcactctctggactcaaatgaacaaagcaaggcagactcctgttatttctggactctgcaaatgtgatttaactggaggacaatacaaggatatctgtgatttaattctcatttgagccatatataattaagtgctctggaatacctctgaccagtagaacttctgaaatgatggaaaggttctagttctgcactgttcagcatagcagccactaatgacatgtggctattgagcacttgagttgtggtcagtgtgactaggaactgactttatactttattttaatgtgaataaccagaggtggcttccagctaccatactgaagagcatagcatcagtaattctgaggagggatggtgtggactccaagaattcaggaaggaagaaacctgagcttagaaataaggaggaaactggaagaaaactccatttagggtggtagcatgagcaaaggctgggaggaaggaaaaggtatatggtttatgaaaattacggaggaaaggaaattgagggaaacaagatgagagaggctttctgaaaataggaagaaggttctagaatctagaccattcctctactttacatgtttgttgtattttactagcaccaaacctctcattatttggaatagtggttgcatagtgtttaacttttttatgccttttataaataattgttttccacagagtcatcatttgcaatgtacaagttgtttgttgaaatttttaatatcagtcagatgggaatctaaagagaattcaaagaagccattacttagcagaggttaaaggaactcaaaagggttgttaagtcacccaggaacaagcaaggcagaggcctaagtggcaaaagtgtgggagtgtgttaaagagctctgagaagagctggagccttggaggaggggtcagatgcctgcagggagggaggaaacatttcagagcagggcagccaatgccaaaactgtcaggcgcaagcggggtggggagaggaaaggatagcctcacctctcacctcctgcctcccactgataccactcactggctaaatgcatccagaagctagagggcaagggatggcaggctgcatagtccacagagcccagcacttcattggcacagagctggactgaagagacaagaatggatagcgagggaggggtggggaaaggaaatggaaataaacagcactgttattttccccccttaatgtttaaaaaaataataatgtcttagtttcagctgctataacaaatctgccattttctgggtaacttaaaccacagaaatctatttctcatggttccagaggccggaaagtccaaaatcaagttgcctgcagatctggtgcttggtgaggcccttcttcctcatttgtagacagttgcctcacacggaggagagcaggaaaggaatttctcttctgtctcttcttacaagggcgctaatctcattctaaagactccacccttgtgaccttgttacctccctaaagccctgtttccaaataccatcactttgggaattaaggcttcaacatataaatttttcttttggtggggcacaaacattaagttcatagcaaatgctaaaaggaaaaccagtttactatctagtatgttggttagattatgacaaaaccatataatggtatgagatgcagcattgaaattacatgtagtaacaagagaacatgctcactagatattaagtgaacatatgaaaacatcacatacaaaaagatcaaaatattgtatttagtagtgtatatacaataaaatataaatgtatattattttcacacaaaaaactgaaaacatacagcaatattttaacagtggtctatctggatggtggtttaacgtgatttttattttccttgtattctctcaggttttccaaattttctaaagcaacataattatttttatgatctggaacaatgtttctgttgttttttgatatacctgcagggctatattgagtagagagaggtatatggccaagttcctttttatcagtcatttgctggctctacggttagcataggtctttgcatgtacccctttctacagtgaccaggcaccttagctgcatttcttagtgcattaaaaacgagacaagtcaataaaatgctcttctttaaaaatattcctttgagaaaccgtgaggtactggagagtggcctgatttcctattgatcgttttattgcctcaattattttctcaaacacggttagttaattcagatccccaccaaccacttttccccattgtctgttacatttggtctctgttaaatatgaatctttggtgacacttccattactaaactgacagttgcataatgctttattggcatctgtaagaatggtacatatttcttaggaactatggagacggtaggcttcttttttttttctgaaccacctaagcatagccagttgtgtgtgctcttgtaattttaatctttaaaacagcaatccatctgtttcacggttttattctttcctaatagaaagaatttcctcttactgtcttactgatctacaaccatttgaccatgatggactcttgtaaatggaattatctgaagtgatttgatgacttttcacattagttttcatttcagtaaatccactccctcttcctggcttgctttttaacctccagctgctacccaattattagttgttggatgactgcttcaacagcattactgtagtgcttgcttgtagcagacattaataatactaagcagtttgtaaatgtgcacagtgttaaacgcatgtaaggattgtttataactctaatcatagttttgctactcgtaagttaggattcttgtggttgcaaggaacagaaatcaactcaaggtggcttcagcaaaacaatgggccaaatacattggttggataatcctaatacacataaagaaggagtcttcaccagggcttcaagacaaagagccagcaaggattccagaagaatgagaactgtgaactggaaaaccaacaagaattcagacaatctgctctcattttctcttgtttctgcttttctctcagtctacttcttcattttttagacacactctgcaggttgattcacagaatggcagaaggtgacttcctactcttttcaagttgactggctatgcccagagccctcagaactctctcaagttctctctcaatttctcaactttctgctcccagaaaggaacttgggcaagctcctttcttttcttagtctaactagtgtatgtcaatcctacatacacatacataacctgatagccttgctatcaggttagggttaacatacactagtgaatggttaaaccatgacagaccacagcacaatgaggtaaatgctgtgattgaggcagctagagaggaagttctgccactccctactgtaggaccttgggcaagttcctttcttttcctagcctcactttccagtaaaataaaaggagaaggttctgccgcttcccatcccaattccaaattccctggacaggaactctaattgacccagctttgatctaatcagcaacaactgtaggcagagttgagaggtacgtccctcactgcctgcagacatcccatttcccctgtgatcattttgagaggatcagaccattttacgaggtgtcaatcataattaatgtgtagttgatgccttccttgtacttagtatattacagagatacaaatttgccaaagtaagcatctttttacattaatatttagaggaagaagaaccatatagctcataaggatctggccagggaagaagtagattttggagactcatgtcccacgtggtgagaaagagtagattttgcattcttcacttaagaaattgtcatagagatatttcagggagatgatgggatgtgatcaaaagaactgaagtaaaatatcagaactaggaatgacactgagaaaagtaaaatagaaaaggattagcttataagaggcaggcaggtttcccattgtgaatatggctgtttgggtaccacatttattaagaatctactatgctatggtctatacaccaaagcacgcatattttgtgaagcttgaatcctggacatgagaatatctgttttgaagcaaccaaaatacggttagcctttctgtgtgggccttattgcattatatccccaaataaagatatataggtagtcattcacttaatagacatttgtccaacactgctaagcctcaggcaaatcctaggcactgtggttgtcaaacagacctttaaatgagtattagtaataattaagctctgtggcaggcacttcggtcagcacttcacattcttttaactcattattctcaaaatacacaccaggaagtaggttcttctgtaatttccattttatagagaagaaacaaggcaccaaaacacaggaatgatgagggctggagcgtgacctcaggtctacctgactataaaacccttggttgtattgatttagttaacattgctatcaagttaggattgacatacactggtgcatggttaaaccatgacaaaccacagcatgatgaggtaaatgctgtgattgaagcagctagaagaggaagttctgccactccctactatgggaccttggtcaagttcctttcttttcttagccttactgacctgtaaactaaaacgagtaaaggactgatcttacaggtgattgtgtggagtaagagagctggtaataggtgaagggctctcacaatggtagcttttgtttttgagccagagtctcactctgttgctcaggctgagtaacagctcacttgcagccttgacctcctgggctcaagcgatcctcctaccccagccccttgagaagctgggactacaggcatgtaccaccacggctggctagcttttcaattttttgtagagatgagatctcactatgttgcccaagctggcctcaaactcctgggctcaagcaatcctcccagcttagcttcccaaggtactgggattacaggtgtgaggcacagtgcccagcaggtggctcttgttattatccacaaagtgctctgtactgtgaaaacaggtactgcctgagtctctgaggactcagggaggaaacgagctttgatgcatctgatgttgctaggtaaagagacaaaggttggacattcaatgtagaaggatctataaacaaaggctcttcatttattcaatgcacatttattgagcatgtactatgtgccaagcactgagctcagtgtgttagttaggggtagataagcacagcaccatggaagcctgtagaatgttctagagtctgactttaaacaatagaagaacctgaggaaagttgccagcaggaaatatctgtgagaatagttatggacatgacaaacctaagattgtctcaaggagacagcaaaccaatttcctcaccaagccctttcaaagttctgtattcagcaactgttttatcacaccttgtgcactgaggggttacccctccatactttttacatccacctgtgtctacacactacaaaataaatcactgtccttcattttccaggatgacacagctgacttttcatatatctcgatgaaggattattcagttatacagaacattcttcaactggagatagcttgagaaggggtaaacaaaaggtgttaaggcatattaaaaattggcttattctagtggcagtttgtcatttttcaatttggcatctttccctgttcttttttctaccatgaagatctgtatgactcttgattcagaggggattttcttgtgaggtacctttctccaagcatatggataaaattgccaggtttaattgaaggctgtttagagtcttgctctatttacagtcaaaagcagatcacttctgttcttggcctcggtcctagactcccaggaaattaatggtgcctcttggcctgtgacagtctgtgtttacttcctggaattggcttctggctttgattggccttgagtgtcagggcttcctcggcccaggtgggccaactccacttgggactgttctggttccctcaggctacctttgtctgaccagctcatcctatagtctctgaagccacaggattgttgtctgtgccttcctgtgattcatagcacggagcaaaggatcaaaacagcttgagctggaaataacttcatttacttttttaaaaaagtaataagcgggccgggtgcggtggctcacgcctgtaatcccagcacttcaggaggccgaggtgggcagatcacgatgtcaggagatcaagaccatcctagcgaacacggtgaaaccccgtctctactaaaaacacaaaaaaattagctgggcgtggtggcaggcgcctgtagttccagctactcgggaggctgaggcaggagaatggcacgaaccccggggggcggagcttgcggtgagcggacgtcacaccactgcactccagcctaggcaacagagcgatactccatctcaaaaaaaaaaagtaataagtggtcaggagcagtggctcacgcccgtaaccccaacactttgggaggccgaggcaggtggatcacttgaggccagcagttcgagaccagcctgggcaacatggcaaaaccctgtctctacaaaaatttagccaggcatggtagcacatacctgtagtgccagctacttgggaggctgaggtgggaggatcacttgatattgggaggcagaggctgcagtgagccgagagggcaccgttgcactccagcctgggccacagattgagaccttgtctcaaaaaatataaaaaataaaaatgagtaataaacacagttgtagcagttgatgtgtcctaagcactgttcttgttttacaggtaaggaaactgagacacactaaggttaaggagcttgctatacagctgatcactggcacagctgggaaactagccccggcagtcagattcagtgcgtgcaatgttaacccctgactgtgccactttgccatgcttagaggtagcctagttcaacctcttattagataagttattctataaaaaagctcttaacacacagtaagagctatgtaagagctagttattattactagtgtgtttgatgatggtgaaaactgaagccagacaagtgatggaagtttatccatttagtccaggatttcacaaattgtattctgtagaacatttgtatcaacaggatgttataagtgttctttttaaaaaatattatagtcaaataggtttggaaaatatacatttaaaaaacagccttttatagtgtagtacttctcaaaccctttaatatgctaatatgcattattaatcttcaaaaagctgtagtatccagacttttcccacctttccccacattttacacatatttgagaccattgtggagaaagcagttaacatagcaggccttagattgttttccttagaaggttgtgattgcaaggttggcccctgctggtgtctagaaaacttgggttttgggagggttcccacactccctaaccagaatggttcactgtgcctgaactgtttgtataaacagtgtcatttatgctgaacacctgctttccttctgggagcctagaattttggcacatgctaggaaggatccccactaaaaaccttggacactgagactgggcccagtggctcatgcctgtaattccagcactttggtaggccaaggcaggaagatcacttgagcccaggagttcaagaccagtctgagctacacagcgagaccctgtctctacaaagtagttttagaaaattaaccaggcatggtggcacgtgcttgtagtcccagctattcaaggtgggccatgggggtaaaggggtactaaggcaggaggaatcccatgagtccgggaattcggggctgcagtgagctgtaactgcaccactgtactctagcctgagcagcagagcaagaccctgtctttgacaacaacagccaccttggccactgagtctctgatgagcttgcctcatagacatttcacatgtgttgtcacaactccttgttagaggaattcaacacatcctgtatgactctactaaaggaaggactcttgttggctcatgcctgattttctctggactctgtcccaggtgccttttccctttgttgattttgctttgtatccttttgctatagtaaatcttagccatgaatacaactatatgctgagtcctgtgagttctcctagtgaatcgcagaacctggggttgctcttagagaccccctgtcacatccagaaaattatttccctctcaatgccgtttaacatctcatgggtcatttgttctacagcatgcagccctgaggagctgttcaatcccacaagttagaggcagacattagcccacataattattctgggcttttggtgaaaaatgttagggttccgaaggctcatgtggaatagcactttcttcctgcctgggacacatagattgaatatatattgagagagcaaaactgactagtacatttctaccacctttctggaatattcagttgggaaggataagcctggaaacagtagcctcaagacataaccatcctttatgttcttccatttttagatttagctctttagcccatattaaaattatttgtataaatctatattaccatgtgtatgaaattataataaaattacatatataatttatatagttttataaagtttgtttactacatctaatcagaaaaccctactaaagggattatatggcttttggggcctcatgccggagcctgtgacatccctcgataattatgatttccctgagttcattttacagaataaacagatgcaccaagggtctccagagagcaagtaggctgctgcggtgcaggacaagccaaatggagacggtggttagccccagcatctgttctttcagcacctttcctggtactcctcctcctccacattcttcatggctgacttgtcttccttttatgtgttttccagatgccaaaagttatatttgcatatcctctaccatgggtggggaactgtgtctcctgcagtccagccggctccactttactcccctactttgtatgcctagactaacctaccctgtcctttgaccttgttttcactgctcttgacctgttgccagttaatacaatcttactccaacaagccaccagggactagttggtttaactggctccttgccccattggctagttggacagataattctctaagcagtttgtcttcctcactgtctacaccccacgcttatgctgcatcatgccttcatttatgtctttcttctatatctttgtcctttttgacctctccaaatcccagctcaggttccactctgtcctctgagaaattggccctcctcattgtaccactactaacctttccagacctgtgcattctcatcagtatctctgtctctaccatataccttagcgcgtatcactttattgcttatacagtcatgcattgcttagtgacaggaatatgttctgggatatgcatcattagataatttcattgtgtgagcatcgcagtgtgtgcttacagtaacctagatggtatagcctattacaaccctaggatatgtggtataatctattgctataggctgcaaacctgtacagcatgtcactgtactgaatactataggtaattttaacacaatagttagtatttgtatatcaaaatatgtttaaacctagaaaagatagagtataaatgcaggataaaaaataaaaaatggtaccctcgtatagggcatttaccgtgaatgaaacctgcaagactggaggttgctctgggtgagtcagcgagtcagtgagtggtgagtgaatgtgaagacctaagacattattgaacactgctgtacactttataaacactgcacacttaaactacactaaatatataaaaatataataatagtactgtaatgttacaatggtgatgatgttactaggtgataagaatatttcagctccatcataatcttatgggaccaccattgtatattgattcattttttactaaaatgtcattatgtggcatgtgaccgtacatccaagacccagtgattgagctcctgctgagagcctttcattccactaaaaaatggagataccaaagagaataaaacaagtccctgccctcaaggactttactgtctagtcgagctatgacatggtgtgttatcctattctttatcacatgctagtgctattctacatgagagctgggaactcttcttctgttgtttccatttccagagtgatgaatgatcaataggaaacaatggttaagagctcaggaacaaacccagttcatatcccacttctgcagtttactagccatgttagcctctatttcctcatctttaaactgggaatagttatatctacctcttacaatgttgcaagggctgactttgataaagtttataaagtgctcagcactgggctaagcatatactaatcacataaggagaaggtagctgtaattcttacgaagttggcctacgacacaagcctttgtggtatttttccctggaactgtgacctcagagcagccctgggagatgtttcctagtggacaaggtcccagcattgtactgtcaaccttcccacattagttcaacctgagcaggatagggggagttaaaacagaatgcaacagtgagtcagaaagtcaacaatgaatgtaaagacctacagggcttcctctgcacaagggcatggatttccacatccatgtttggattgaagtttgctgtccctcgcttgcttcatttcctggcagtcactagaggcagaatggaagctggaagtcaggaaggaatttccatgtaatgaccatgtactatgtgccatatatatatgcacattctcagtctttacaacatccctgccaagaagatattcttattcccacttcacaaatcagatagctgaaacttagaggttaagtaacttaacggaagttgcacagctaacccaatgcagatccaaagcttgtgtccattatattgagtgcccctcagtaaatcaaatccatggaagtcctgacctagtccggcctgatctgtttgcatttccccctctacacaatacactccttggcccaaggggtctgtggtagagatggaaacttcagtgagcttgcaactctattgttctaatacacctcttcagggccaggatgaggtaaggcaagcaaagtgcttggcacaaaatgtaaaaaggcacttactcttaagtttatgtatgtacaagatcacaaatttgctcaccctaatcccaacccagcccctcctgttgattgtcctgagatgtgactgctgggatactctagaggaaaccacaaagatcttcatcaccatgttaaccgaaatagggctgggactggcttgcaggctgtttgatactactcccctgtcaatttttgcatgttgcatttctggttagcatctgtccccaaaacgattccccccctccaaaactaccttttattattttttccaccagattttctctccaaaactatcatgtagccacacaagcaggaagagaaagagatccctgagatcctccatcaaggctggaaaattggttataaccaatttgctaactccactctgttggaagtggctgagtagaggagaactggggaaagattggtgcacggggtgagcaggacctgcctcctgcatgggatgtggggaattgcacttgccattgttggagcccaggccaacccttctcatcttacagatgaggaaactgaggtcttgagaggggaaatgacttctgtgagctcacttagttggccaatactaaattagagctagaaccctatttcctactcctagcactttttccacactgggtcagggaaatagggtccaccatatacattcttatcttgactgcaatgctaccacctccaccaccaactcctcaaaggaggcaccatcctgactatagctgtgcccatttttctgtctgtcaaaagcctgttgatgtaattgaataccagcaatgcagtacatggcccacctatatcagaaacttctagagtaattaattgaaaatgaaggttcttgggacatctcctagttcttctgagtcagaaggtgattctatcactagcatttgagaactactaatctggatttgggactgtttatatcagtgacttcttattcaatttgtgggattctttttgtttttctttcctttggggcattaagtcagtacttccatcgtcatcttacatttctagttctcagtcaagttcaacaagaaatgaaactcactatattctttatcggactgtaatttggccaagatagaaatgggaaaagggaaatttcaaagtaggagatattcgattttctcttgtgggcatgatagagttatgtagaaagatcccttatctacgattggtgggtttcaagtctcttatcaaagacagtgaaacacttttaagattgttattttaagatgtaggcaaaatgtttccaaatatatgtcagtagtctcttaaaactttttttttttttgagacaaagtcttgctctgtcgcccaggctggtgtgcagtgtggcatgatctcgactcactgcaacccccacttcctgggttcaaatgactctcatgcctcagcctcctgagtagctgggattacagatgcctgccaccaagcctggctaatttttttgtatttttagtagagacggggttttgccatgttggccgggctggtctcgaactcctgacctcaggtgatctgcccaccttggcctcccaaagtgctgggattacaggcataagccaccacaccaggcctcttaaaactttttcataggaattttgtttagtgctttaagcagagagtacacaatggtgggcatgggccatttctgtgaatacgcatgtctgccacacagacggtttcagaaaatttgaattagttgccaatatttaaaaccagatttcaacaatttaaaatataaatgtttatcttctgttttaaaaatttaaactattttgacactgggcctgtcatatactgcctgtttgtgccctcccgaaattgatatgtcaaaacactaatcccaatctgatggcatttggaggtgtggcttttgggaagtgattggatcagtgcccttataaaagcggtcccagagagctctctcacttgctttccactacgcaaagacacaaggagaggttggcatctgcagccggcaccagaaactgaccacgctggcatcctgatcccagacattcagcctctagaaccatgagagataaatttctgtggtttataaactacccagtctgtctgtggtgcagcctgaacagattcagactgggccacagccacacaatgcaataatctggtgcacagaggtggtctcttagactatggcatattaaagatgtttgtaaattatttaacatttctttacttgagaggtggggtctaggtatgctcctcttggatctggaaaggcttagtgactgctcttatcagtgaaatacgagaggtgaggctaagctaggcatacactggctcattttctatctgttgggacatgtgttcagggcagtgaggcaccatgtcacaaggccagctaccctgagaccaccatgctgtgagaagaccaagccacatgaagaggccctagaggaagaaacaccatgtggagaaagacagaaaggtcaaggagcgctaaggtgccagatacacaaatgaagaagccattcgtttttcatccccatgaggtgatgtcataaggatcagaaataagccacccagctgagcccttcaggaatgcctcacccacaaaagtgtgaacaaagtaaaaatgattgttttaagccacaaatttagaatagacaactgaaacaagagaatgcctttccagtgcgctctgttctgatccccattccttcctctggctttacttcaattgttttacatcctggctcctataggaatttgggtcataatgtttatttaaatttcagtctggagaaccttgaattgtgtatacttttggaaattaaaatttttttgagacagagtctcactctgtcgcccaggctggagcgcagtgacaaaatcttggctcactgcaacctccacctcccgggttcaagtgattctcctgcctcagcctcccaagcagctggaactatagccatgcaccactacacccagctaatttttgtatttttagtgaagacagggtttcgccatattggccaggctggtttccagctcctggcctcaagtgatccacccaccttggcctcccaaagtgctgggattacaggcatgagccactgcgcctggcagggaattaaaatattaaaaataataatatacatatatacatatatgtatgagtatatacatgacaaaattaagttgtaagggcaagaatgatacagacagcaaataaaatgtctacttgaaatactttacctccatgggcccccttggcaaggtaaagagagcataaggtcaagaatttgtcacccctggtaactggttttcttatctatataaaggcagctcccattcatctttgacatggatgagtctatgaataagacagctcagcttttgtgtttttcttttgggtgtatatttgtgtatcttttaacgttctagaaatttattccatggcaatacagcctgtggggcaaatgaaatgtctacttctttgttgaagcctgtgccttattcatcttgttcctccagctctcagtaaatgtttgttgaataaatgaatgaacaaaggaatgtgtgttagtcaccgagggtacaaagacaaatgagacacgatccctgcccttgaggagctcacagtctattgaacacaggcagcaaattaaatgccggtcatgccgcctgggtagcacattcttttattcagaaacaccatttcatctgtgcttggcctctgttcacacccatacccagatgaaactacaagatgtgtgaaaacgtgccctggaggagccctgacaggggcaaggggctgcaaaccacctgctctgaagagacagcctctcagtgttgaagtgagtgcatagggaggagaaagagaggactgacccatcgcagctgcaggaacagagacaaaattactcagaatcaccctcagggacccatcagaaaagcaagaacaaaatcactgccgcatcattccatcaggctgtgcttgcacagaccacagaaacgcagcgaggccacgtgatcagcaccactcctcagagctgcggcggcagccaaaagatttaggatagacaccagagttttgcttgattttttaacagagatatgaggaaggccctgattgtaatcagcctgctccccttccacctaccatccccatgcatttcgaggaattgtcttttttctttctatagtaggtttagcaaagtgtcagcttgtgcatttttctttctctctctctttccttttctttcttttctctttattttttaagacagggtctcactctgtggctcaggctggagtgcagtggcacaatcagagctcactacagccctcacctccccagcctcaagtgatcctactgcctcagactcccaagtagctgggactacaggcatgcactaccaaacctggctaattttttattttctgtagagacagggtctccctatgttgcccaggctggtctcaaactcctggctggactcaaacaatcctcacacctcagcctcccaaaatgctgggactacaggtgtgagccactgtgcctggccccctttctttctttatgaggttgttagtgaaacaggacagaagagaagcaaagatctttgtttaatcttagagataagtggcggctcattcttgattctcccagtgagctagagtatcgatgtcaatatattgatatgatcaacattttacggagtgttgattaacattcatttgggttttggaagatttctatttgtttatgttaaataacaaaaacatgaggttgtcaggaaattgttaggtagggatgcctttgctgccctgttaatttccaagcaacagggctgtgttctagcccagggaggctgagctgtagttagaaatgactttctgtgtgcaaaacagaacttggtgaaatacttaaccagtagttaatttgctgcctttgctcaatagattctgaatgccttcaagtagaaatcccaaaagaaaaggtaaaaacaacagcaatggcaaccaaactcctctcttcctcatagtctaaaagtatatcagcatcttaacattttgaggagaaaacattatctttatcagcgttcattttattctttaacacattgttttttagtccgtttccacattggaattcaaaaagtaaacataaactcactgtcttggtaattagaccaaagaataagaattgatatcaaatattattaaaattaaatagctgcagaaactattaataaaaagtggttattaacttgcacatcttatgtactgactgcatacttcatccagttctagctgaagagatccactttcaaaaagggaagaatttatgtctttgggaaaacattacttgctaatctttgtttctgtccttttaagtttcacaacctttcttgtatctgtagagtagttatacattacgcttagctgttgagtgttttctgtgtgatctgctatcctgatgatttcagtacatttaaatctagaatctcatggcccaagacttctgtctttagataggtgctacattgttaagtgagtaaaagctgtacagtagtctccccttatctgtaggggataccttccaagacccctggtggaagtcttaaactggcatcctatgtatagtatgcattaatttctttttgtttcttcacaatttaatggatagaagatttgttcttaccacagatcttagcaacctcagcatacattttttttgttgtttccttattaagttgagaactttcactatttcacttaaaggaatcaatgtacggcttctctttggcatatcctgattgctagcatcactactcttgagctttggatcaattactaagtaaaataagagttactttaatagaaacactgcaatatcaggacagtccatctgagaagcaagacggtgactaaggagggagtgtctacagtgtggatacacgctgagtttatgtccctctttgggacagcatgtgggagaccatgagattttatcatgtcctttagaatggtatgtaacttaaaacttatgaatcgtttatttttggaatttttcatgtgatatttttaggctgaggttgaccctaggtaactaaaacggcagaaagcaaaaatgtggataagggggcactactgtattgcccaccctgaaggacatgactagaaggtgaaataaagaaagcatgacaagatagcatgcttggtctccctgctttggaggggtctgaatcaatcaataccttaaaacccagggcatgtacagggacagtgatgtgcaaaagctgagctggcgtgtgacatggattactggttccaagccagcaattactaggacccgctttgtttgcataatcttgtcccgtaatctggagcactgaaaatttctcttttttttttatttctctcttcctttttttttctttttttaattatactttaagttctagggtacatgtgcacaacatgcaggtttgttacgtatgtatgcatgtgccatgttggtgtgctgcacccattaactcatcatttacattaggtatatttcctaatgctatccctccccccttctcccattccactacaggacccagtgtgtgatgttccccaccctgtgtccaagtgctctcattgttcaattcctacctatgaatgagaacatgcagtgtttggttttctgtccttgcaatagtttgctcagaatgatggtttccagcttcatccatgtccctacaaaggacatgaactcatcctttttgtggctgcatagtattccatggtgtgtatgtgccacattttcttaatccagtctatcattgatggacatttgagttggttccaagtctttgctaatatgaatagtgccacagtaattagaatggcaatcattaaaaagtcaggaaacaacaggtgctggagaggatgtggagaagtaggaacacttttacactgttggtgggactgtaaactagttcaaccactgtggaagacagtgtggcaattcctcaaggatctagaactagaaataccatttgaaccagccatcccattacggggtatctacccaaaggattataaatcatgctgctataaagacacatgcactgaaaatttcaaatggagacagtatgggtggaattcctgaagcataaggccctttcttcctcaattcattaagataattctatcatgataaaaatcatagactcaaaagaagctttgaaaggttgtattgtccatgctcctgattttaggtaaaaccatgtatgacctatccatagaagagagcaattatgcttgtttctaagctttcgagaaaatgatcatatttagccgtctctgacaatgtatcctgatgtttaattaccttttctagaaggaaactcctggtattgttttagagttagtcagagctgggttcaaatatctgtgccgtcactctctgatcatgtgactagcatcagattactgatgccaaatcttgccaaatcttaatgaactaatttgtagcatggaagtaacatctccttacatcatgaggtggttttaaggagtaaaggaaaacgtgggctgggtgtggtgccttatgcctgtaatcccagcgctttcagaggcaaaagcaatggattgcttgagcccaggagttagagaccagcctgggcaaccccgtctttataaaaagtacaaaacttagagggctagtggtgtgcacctgttgtcccagctactagggaggctgaggtgattgcttgagccaagcaggtcgaggctgcggtgagccatgatcatgccactgcactctagcctgggtgaccctgtcccaaaacaaaatacaagtgcagtacctgccatagaaaaggccctcagtgcatattacttccttgttcctattttacctaacctgacatctcatattgcattcctggtgccagaggaagaatgttcaatggctaaccattccctagggtggtagatagcatggcacaactgaaagattcggcacacactttaatgataaactggcatgccaccctcagaatagcaagataaaaggggaaagcatttagtgtgtcacaccaggttgtgggagaatcagtagttcctgaaaattctttgctaggtacgatttgacattgtacttgggacttcggacaaagtagctttatgtcaagtcccctaaatagtgagggaagacaatttcttggaaaaccaacctcaactactttgcagtattgggtgagagagtgggaaacatgatcctggtggaaagctgcgagttacaagcacaaatggcagaggagggaaaatctggatttgttggttgagacaacaatagcagtcctggatgagccacattgggagcattgcacagtaggtagaggacctttgaggtcttgcatgtgtactcctaagagatgcaggaagttcctcctttagtggtggctgtgccttcactggggctaggacgtttctggacccacaactgcagtgtgatgcaaagaccttcaacatgacacaagagaacatattttaaaaagagatctagacttgaaaactggtctccatgagcacagtaaagttaactggaactctcacaccacgtgtttgggaagtgggactcgctgagaaaatgttagaataattttcaaatatatgaagagttacaaagagcaatgattgcaacttcaaagaaagggagagccgggcatggtgtctcatgcccgtaatccagcactttgagatgcagaggcaggaggatggcttgagaccagttcgagaccaacctgggcaacatggtgaatcccaatctctgctaaaaaatacaaaaattagccgggtatggtggtgcatgacagtagccccagctattctggaggctgaggtgggaggatcgcttgagcctgggaggttgaggcttcagtgagccatgatcgctccactgcactccagcctgggtaacagaatgagaccctgtctcaaaaacaaaagagaaaggccgattccaaatgatgctcaaattatgggagatgtgattccaatttgatttgagaagaacttcctgacaataagagttatttattaaaaataaagaggagggtaagggaggagagggggaaggaatgggaaggggaaggggaagaagaaattgtgatgaatctcctacatatcttagatacaaaggcaggcatctcttcactataaaatgagcataatcattcctgaatatcaaagagctgggttttatctttccatcattgtttcatgcaccaaagagatactgtgtacatagcttatgccaggtacggtgttgaggtctagcatgataggaatgacagacacaggccaggtactcaaagagctcaccgattggtgcctgatgctcaataacgggttgttaaataaatgtgtaaatagagatgtgtaaacagataaattagaatacaatgacataagtattaatagcttcttccatagtactttgtttatatttctaactgtgggagtgctttgcagaagatgtgctgtttgggctgcatcttgaaagaggattattggtttgcaggatgggcactgaaggggtgggacactcccctcccacacacacacacacacacagacacacccctgccccccgccaatgtgcacacacacacacacacagacataccccctgccaacgtgcacacacacacacacatatcccccaccaacgcacacacacacacacagacatacccccgccccccgccaacgggcacacacacacaccagaggcatggtgcctgggctatttgatcactgagtacagtgtgattggattaaaggttataccgtaaaggttgagaaggtcagtgatcaaagaggaggctagaggagaatggggtacataaatcctggtcctttaaagtatctcttgagctcctagtgactaacactttactataagtcaagtccttctgtattgaatactcccttgatctgtcctgaaaatgggacactccttcttggccctaacttgtaaattaaaaaaaaaaaacaaaagaatcataacttattctaaaagataggtgtgggtgaggaaattcttcaactagggaatattttaacatcaacgtcagctattcatgaacatcccttctttttcagaagtgatacacttgggatcatgatacagaaagctgagcaagcctgggcattggcttctacccagggagtggtagaacttggtgtaggaagtagatgagaagggtttttcaatgaggttggagcgccataacacagcaaacttgtcactgagcccctgtcaacttattttgtcgcataaaaatctcaactgtgcacagagaggaggtgactgttggaaattagaagttcaaggaacaagcctctggcagacactggcttttagaacttagggtctctcccaccaggaaaatatgtgagtgagggaaggagaggctgggagctggagtaaatcaactcagaaaagccttccctgcgataactgtgtgtgagtaccttctatttttcaggcactgtgctaatgctggaaggcaaataccacacattccctgcctgcaagagtcccatgttttcctcatgagacagacatttcctcgggaagacaaattactaagcatgagataaatatgaggtcactagaagggcccctaacttcccttaaaagggagaggttcggaggtcaagaagcaggggactccagaactgagacttaacaagggaaagcattccagagatggtggtgagattcaagaaatggacttgtttggtatggctggagtttgtggtttgtgatggggcaagtatgagggctaagaccgaagtagagagaaaagcagaaaagcatatgttactccagtattggaatgtcaacagtaaaccctcacagccctacaagggatgacgctgtggcagagcacccagtgtcatgcggctgtgagccaaggtcccatgccctctgcatgcacacacaggccatcatcccagggctccttcctatcactgcaatgcttatgctgaaaaaagcagggatgagcacaattgtaaagagtaatcagtgttgtgactaaataaacgaacgacacctgcacatcctgttttgggaaatgagtcaaattagtgaaacaagttgaataatcactgccaatgccaatctcagccactgcagcgacgctggtcatttctagttttaatgagtggctttgtgatcagtgttcattcatatgagtgaaggagaattttaggtttatgttttattttcagtcacacatgtaatacgtcatcattgtcagggaattaaatagttttgcaaaaataaaaaacctaaggttactctaaacatagaaatgactgttaatattttggtgttatacactttcagcctttcaggagtacatatatttacaaaagctattatttcttctcttagtttacatttgactttttaagttttttccctttgtcccccttttttttgaagggggagctagttttgctatatggcctgagtttttctttgattcctttcccccaccccacctaggggatttggaaggtgtggtacctgtcttaagttcctctgatagttactatcaggtgtttaagtaatattaatacatgtttaaaatctatgttctaaacctcaggtttccccaattatgaatagtgaggacaaacaatccattgattcacccctgtgtacaaataagaaattaccatactttcctcctccagcttcccacgaataccacctcaacctcccagtttttgttgttctagtttaagattgttgtcccagtctagactaattgaattattgattctcacatgtgtggacctcttgtttcaagattaatatttacattcttcttagaaattgttattttaaaatgttcatgtgcctccatttccacactcttggttaatctcagttatcatggagaacattggcgatctagagcccttccctggctgaaaatatcttcttgctgccttcacttactatggacagcttgggctgataaaagaatttaggaatcctaaaatcaccattctccctgaaaaccgcatagacaaatgtcattggtatcttgttttccaggggccctatttctttgtccaagattttgagaagtgtcttcttcttagagttaatattcagtagatccaagtgtttttctattttcagtaagtccatagtaaaagccttttaaactggagatattttttcatttaagggaaattttcttccatataaatttttgaaatggtttctgttgcctgggttctaactacttcctcttctgcttcccctggtgcatctgctgtgtatactaagtccatgttcttagtccatcttttttcctttgatcactttcacttgcctttttcctccctctgaactctggtgactgtctcaagtttgtgctgaccttttgagttactaaaccagattgattttcagcatcatctcaggatatttttgcaaatagagatttcttagcctgacccaagacccactgaatcaaaatttcctacatttgaccctaggaatgtatattttatgcgtctttccctaccttcatattccttcttttttttctatttttatagagttggcaggtacacgtgcagatttcttacacacatgtgttgtgtggtggtggagtcagggcttttactatacttgtcccccaaatagtgaacattgtacccgataggtaatttttcaaccctccccttcatatttctcatgatcatgtcgcttgggaaccactgtccgtcccacttttctagtttaatctgtttcattaagggatgattctcctctttactgcttttcattgagttttaaattctgcagtgtaattatttgcttacttatattccttttttaagataagatacctttttatctcaatctgttgcctcattacctgtctttcagcaagtttgtggtttgaataattactttgaggatacattaaacttttgtatttctcttgtgatcagtctcttccaaagtatatgattctttaatcttttgtatgttatgtttatttcctccttttgtgttgaggaactttcttcattccatgtttgggacctactttaaaactcactcttcagtggtatcttaggtgacttctctgcattcccaggcactcttaagctgtgatctgcatgatatgtattcacataataagttttgtcattcagccgcccaaggaacatggagaagagccaagtttgtgagcagccccagcaatagaactttgccttcacgtttttctacatatccaggaactcttgcatcaaggcctgtgtctccatatcttctgtatacttaaatccaacgtagctacatcttgtgtcttacatgaaatgtctacccatgcaaattagctagaacttgcatgagttgggatgatatcctgtctagttccagaatggttgttctatttctttcagaatggctacattggtgacaattgggttagagaaaaattgtgtgattgagccatgtgcattttattccctacactacatgttccatgttgttccatacaagcgagttcttcttcctcctacaaactgcccttacccctccatctcagccctcattaatattcttaatatgggagaggttcttaatatgaacctctcccatagatgttggaggaagttcacaaaaaaagtcaagtaatagccaaaactgtacataaacccatcattcatctgcaattatgatgacataaattgtgctatatctgtgcaatggaatataaaccctaattagccacatgaatcaatatgaataaatgtgaaaaagaaagttgagcaaaagagtcaaataatggaaaacatgcagcaatgacccattcagatgaatttcacaaacaggcaaagcgacgcagtacattgtttacactagagatatctacctaggtggtagaagcgttttttgttttcaagtggataatgaacacaagtacagcatagtgataatcgtagatggagagtgaagggcggggatcagggagatgcactccagacctttgaagatgccactgatgttccacttctgaaggtcaggagctaatggacaggtgtttgtttccttgcaacttttcatagtaatactaatttttaaaatgatttttaagttttgatataacttaatttcatttataataattttaatcataataattttaataactcctttatatatgatcatttataatacaaaaaacctaaaagtaaaaattaaaccatgtaagagaaaaatttgccaaggctggccactcactgttccttctgtgggccactccactgtggccttagatgaccttatgtccaagatagggaaggggtttctgcagagtaccatgttccttccactcatctatgttgcccaacttcctaatttagtgattttttttgtttacttttccaaaatttcttcctcttaatctttagcaaacaactgtgctgcactcttaggaggtgacgtacatgtttttcctcaattcgaggctgtttacgtggcatctgatgcaggtttctagatgcttataaaatgcctttgttgagcaacctactttagcgctgaggagaagctttttcttatgcctcctcctctttggattactgaagggaggaagatgggatgcttgctttcatgtgagaccttcccttagaaacaaaaaagatggctagtgttacacataggatgatatgaccagtgatatgactatgaacaaggaagagcatcatttcaagcagcactgtgtgcataccataatacctacagatgagaacagtgaggctcagtgagttccatgacttctcactgttgatgtcaagggcaaaagctaaattcaaacacagcccgagatccacctgctatgcactacatcacactgccttatactttaagtctgtggtcaatggaggttgaagacactttcagtcattcatcatatttttgttgcgtacctcctatgtgctgggccaggatatcgtcacacttaaaatatagaatagaacatgggcattaaagaaagaattgcacaaataattattaaataacagttgtgaatgaattgctttataattgtacataaggggggaacctagattaccgggttatggaaaggatttattaatgaagttgccaataatctgaaacagaattgaaaaaccaggaaagcagagaagcagggagaatagcagtgtaatagagggcacagcctgtaggaagagcccagagactagaaataagttggtatgaagaaattagcagaagcacatagtaaggaaggcccaagatgggaagcaataaaatttgtaacctctcataaagctacaatcaggattttggtttcagcctaaaagtaaggcaagtttctgtggggtttaaagaagggaggaggcacggtcatgtctattggttgtctactgaaaaaggtgaagagagcagaccatgttattcctgagccaagatataatcaggaattactgacatatatgaactgtttgttacattattatatatttgcttataaatatatagtatctataataagactctttaaacaggtgaaaatatgtcacccacagtctgcattttgaagatcgaaaacagatctggcaaaccttaaaagcaatccctggcattcacaacttttcaagctcaagattcctcttctgaatgggagatgtcaggaccttggtgcaagccccatcaatcaggccatctttgccagtcagacttgcccacccttctgccaataaaaggttggggccttcaaccctgaatactccttaagatcttcaaagggccacagatatgtaccatatggcaaaataaatgggtctttattttaaatcaacattttattattatagagccttattccatgattttgaaaggacccatttagaagttatttttaagtatcagagaattaatttcaatgaaacttcacttgatttcccatcatctttcccctcttcctcgacatttatccattgttcttccatatactgggagactgctgattgttctccagaacaatcccatgtggagtaactaatggtttaattgacacctgtttatagggtatctatggcatggggatactatgtcttatgctttggatgtgaatgacaaagacagatgagtcagattttctgctttcaagagaattcaagcctcggaagaggagatcagagcatcccaaaacactgtgatgaagggctacagagatggagaacacattctggattttcagaagcaagaaagaagccaggaggactttcaattatttggatctctgtcagtaggaattattttttcaggaggtcgtttaaaaaacacacacacacagaaacaaaaagctgcaagcccatgctcctgaaaaatcaatcacattagaattctaagcagtccattcttgtattccctatgtaattccctcactgagtccatctttttgaacaaatctctgacgtagtagtgcatctgtgggggatcactcatgtgcatgtcagcaggccactgcatggttactttacagaagggaccaaaatagctattttctagttgctttcattgttgacttgcttcactgtaaatgggatataaagctggctatgttaagctaattatacgtaagcatttatattctgctgctaaatggaatcatgtagaaggcatccccctgtcccaaaagaatggaacatgtaaccataataagcattttttaattagatgaagcaccttgctgccttttatggagaatgatttattaggccagttttgcaccccattgccacaaagtatctgacgaaccaggaaaacatatgtgggtcctgcaggattaaatttggtttgatactcaggataaaaccccagataccttaaagtaacaattccttagttggggggctagagggaggatggtgatctctactaagcatcaattcatatacagattgataaacttttaaattcctcacagatacacattcctaaataagctgaaatggctctctttccctgttcttgggtacttgtcatcctcctggaaatctaaagcaatgtaagtcactcagtcatcagagcagacatatagtataacccgggatatactttgggtgtaaaaatagataatcttccccaagccttcccctaacttgggaccctgagtttttggcttcttttaggaggtgacatttcactactttcccctaagtcatggtaattttatgtcaatcctggtcctggaaccgttgttcctgagttccttatgagaaaacttagttgtcatttgcattttcaatccctgcaatggattggcaggcattagagagttaatccatcctctagcaataattcataagtatatacatatatgtatccaattcaacagtggagcagggcactattattaagaaattgaagcaccaggtgtgattaagtaatatcacacatttcattctctctaatttcacatcattcttcagcagctgaatccatgggcttccggcgtgaagtcagccagcaccatgcatttttagtatgctcagcagagcgctggcaaaatgtttccaaagtaagccgccctgctgggctgttgtaagtcaaatctggtttttgcctccaaattattcagtattgctagacctggtttattaatccattcatctccctagagagtaagacttctggtacttttacatcattgatgttcaatttcagctaaaaatactttcaaaaatagagaggactacaatcaaggataaagaaacaattaggttgccaggggcctggggttgggagcagtgaggagatgttggtcaaagggcacatgctttcagtcatgataagatctggagaccaaatgcacagcatcataactatagttaataatactgcatggcgtacttgaaatttgctgagagatcttaagtgttcttgccacacacacaaaaaagataactgtgtgagttgatagatatgctaattaatttgattgtggcaagcattttacaaggtacacatatgtcaaaatatcacattttataccttaaatatatttcatttttacttgtcaattatacctcaataaacccgggggagcaaagaaataattaggagaagtcttcacagcttccttctcactctctcccctcgtttcttccttagttctccttccaccccaactctgcttctaggattaggagttagaaatggcattaatacctttcctttgcaagcatgtcccaagaagctacatttgtggcattcctgctcctatttaaaaaatgaaattagggtaaggaggcaattctcaaattagggttccattgccacatctctgctgtttagcagcaaatagcttgggctcacgagactaaagcagtatccctgtgttgaaaagcaggcagtagtcacatacatacccagcataccaataagcaccagcatagatgcaggctctggagagagaagagtagccatctcttcccagtcatgtttgctcttcctttgcaacaagaggcaaatccctatgaccagttgtgagtcaactgcatagcatggtgtaggttaattcattccacaaatacagattgaatagccatgtgccaggtactgttctaggcagcactggacatacatgatcactactctgatgaagcttatcactgtctgtgacatgacctccgcttactgcaccattctcatcttctcccccagtggactctgttaacatcaggcatatagaatcacttgcggtcccatgaacaccatgctctttcctgcttctgtttactttggcccatgcgactgggcaatcttctttctacccatttgtctgtctaacttcaattcaaatgtcaggtctcacttcctccacatgccttctctgggcttacccctactttaagttcacagcaatatcttcttgtttttcatccctactataaccttttcaagggtaggcatggtgtcttattcattatagttcaccttctgtttgagatgtagtgggtactcaataaatatttattgaattaattattaaattcacttatatccttgaatacagtccacatgcactcgtttgccctccaggtaatccttgtaagacccacaagatagctgttaaatagaaagcagaaaaattgtgacatttataatcttgatcaccttaattgtagtcagaattaacaactccgtgtactttcttatgaaaatcaccttccctccctggtatgctttttaataagaatggaaccccttggcaaaattaaattggaactgttagaaatattaggtggttctttgttgaaatcttttctggagaattattaagcctgtgccttccttaccgaatacagattaaaatttattttaaaataaggagaagaagaaacagacataactattaaaaatagacatgcacatagataaaagttagaaggaatcggcaaaaatgaatgagctttctttgggtaatgggattaagggtacattttccttttgtcaaaatgttatttagtattttgtaatttttaaggaaaaagtattaaaaagaaaacaataatcttcttgaaaaaaacctgtatgtataggaggtttttattttactcatatgagtccaagtgaattaaaggtttcccctgtgcaaacaagtattgccagtgatgttgtgttgtacagatttttttttgagacaggatctcgctactattatcctcattttacagggaaggaaagtgaggcataaagaagacagggtctcactctgtcacccaggctggagtgcagtggcgtgatctcagctcactgcaacctctgcctcccaggttcaagtgatcctcccacctcagcctcttgagtagctgggactacaggtgtgtgtcaccacacccagccaatttttataatttttttttttagtagagatgtagttttgctatgttgcccaggctcatttcaaactcctggcttcaagcaatccacccaactcggcctcccaaagtgctgggattacaggaatcagccaccacgttcggtgtagatttttttaaatctcaggacttttttcagcaagatatccatgcattcattcaacagatattagacatcctatgtcagacattctactagacatttgttttctctgtattaataatatgatgacaaatgcatgcagcacttgtcacctcccaacactgttcattcccatacattagatctatctctcacaatttataatataaatagggcatatatatttgttaaacaaacactagctgctgtaacaaatatattccaaaaagttaatggcttagttctttctcatttaacagtcctaatcaaaggctgcaggtcagtgggtgactctgttccacatttaggactccagtctgacagcagctctaccatctctaatgtgccatttttgagattgctccagtccttgccgttccagcctgactaaagggccttcaacaagtaaacacaggttacagacatcacttgtgtttacattctgttggcaagacctgaatcccacctgcttcaagggaagtttcgaattatagtcttgtcttatgaaggaaagaatggattttggtgagtagcagtctctgccacaacaaatatttttaaattttttttaatttaaaaaatgatgaagatgtaagattaaaaacctaaggctcagagaggttgacttgcataaaatcacccagctaaacgtgaacagttaaacaagaactggaagtggggctcctgaatgctagatcaatgtctcttccatcacttggatagtaaaatactggcttggtggaaactttacccatggataccatgtgtactgcctacgtgaatgtgaactgttataccacagcccaggattttatattcaggtctagctttacttggttcagcctacgacagagagaagggtctttttagtacatgaagaaaagctaaatgctgtcttgtaaacattttaatgtaagtaatgtgtttggctttccaccagctccagaacatgactgagaacagactaatgaaacccatacctacgttaaaagctgatgaactgcccacaggcatgtagccagggatctcccttataacttcagttgctccctattcagtggttcatttaatgaatatttatgaagagcttattatgtggtgggcatgcagcaacagaggggacccagacagacacagcccccatcactatggagcccactacagacataagaaccaataaaatgatcacaaattgtgacaaagaatgctgagagagagagtaattgtgggaggcctatttcagagacacctctgagaaggcatttctgaggaggaggtttttaagctgagtcccaaagggtagaggaaagagtaattgtgggaggcctatttcagagacacctctgagaaggcatttctgaggagggggtttttaagctgagtcccaaagggtggaggagtcagtaaggtgaacaggagggataatcttccagattgcaagacaatttgaatggcagctctgggggaagaagaatgtggcacattgaggaactgaaggcattctgtgtggccaagggtattgagtgagtagaaagtgttcaagttaataacaactaaagtatttatatttaaaccttacaattacctgtgagagggcttattattatcatcctcattttacagagaaggaaactgaggcataaggaaattaaatggttaaatagcttgcctaatgtcacatagctcataaataggaaggccaggatttaaacccaaggagtgtagctccaaagtttacccctacacactgcattatgctgtcatactgccataggaagactcaaaaccttccactatctacgaacaactttttcttttcattttttcttttgagacagagtcacactctgttgcccatgctagagtgcagtggtgtgatcttggctcaatgcaacttccatctcctaggttcaagcaattctcctgcctcagcctcccgagtggctgggattacaggcatgtgccaccacgtcccgctaatttttgtatttttaggagagacggggtttcaccatattcgccagactggtcttgaactcctgacctcaagtgatctgcccacctcagcttcccaaagtgctgagattacaggcgtgagctactgtgccaagcctacttttctttaaaaaaaaaccaaaaaaaaaaaaaacaaaaaaaaaacacctcttttcccttagcaagggattcttaacctgagatccttggatccattcctttctcaaggaaccatggaaagaattcaggagggctgatgaagaatatatatatatatatatatatatatatatatatatatatatttattatctatgatatatatgttatatatatcatatatattatatatgttattatatatgtattcatcaacttcttgctgaaattcaactttttattacaaatgtagggtacaaaactcaatattcttagcaatacatgtgactttgtcaccaggtcacaggtgatttttttatcacataaaggttgctgaagatacctagagatatcatttgtttgcactcatcactacttccaaatatggtattatttctgccaataattaatgcattgacaaagacacacatgcattgttctgttatagatttttatatatatatatatatttttattatactttaagttctagggtacatgtgcacaatgtgcagatttgttacatatatatacatgtaccgtgttggtgtgctgcacccattaactcatcatttacgttaggtatatctcctaatgctatccctccccaccccccccaccccacgacaggccccggtgtgtgatgttccccttcctgtgtccaagtgttttcattgttcaattctaacctctgagtgagaacatgcagtgtttggtttttttaaaaaactattttggtcaatgatttttcaatataacgagttgatttttgtaattttctattttcctttttttgcatttaaaaacattcttgaaagaaacaaacaaaaaaagaaaataaaaacattcttgaaaagagacccagagggttcaacagactgccactggagttcatggcacaagaaaacattaggatcccttcccttaaccctttctatatttaagcttttgccctcctttctcacaaagctagatttctagagtcgtccatgtgaatttcctgtactctgtcatgtcccatttgttccacagtctgatgtttttggactttcactctcaactttttttcacaagatagccattctaatatcactgtagtcctctgaagttaaatcagtactgttgaatatttcctttccatgacatctgtagaattttgccacagttgatcgctttatttcttcaaggggctctcttgcttcagcttcaggaaattcactcttcttttccttacctactctgcagtttctttacaggctcctccactaatctctcttttaaaagtaatgatccagtattctccttggtaaaccacacctactcctaagataccaagtgcaccaatatgctgatgattctaactctagcgagttctaagcttccttcctgaatgccaagctgtccaatgaagattttcacctttctatcccagaggcatctcaaactcagacaccaaatttaaacttatatattatctcaaacaccaaacctgcgcttttctcctgcatctatcttttgattattgccatcagcctcttcctgatcactcaggattaccctcagttgctccctctttctcacccctacttctgctgaacacatagctcttcctcgtctgcatcatggaggaagggagtcttatctggcctgaaaatgatgtgtagccctgggagagaagcaggtattctaagtataagggttggagcataatatcaatttataaccccttgaatttgctctgtagttttaattacttgggccacaacttctgctaggaatttgatagctcagttatgaatgaaaattcaaatgttagtggtttcctctccttctcagagtggagcatgttgaaaaacaagtcacctttttctgccagtgtcacacagaactccttcccttgctgactaggagtttctgactttttcatgattggaacagggtgaagggagagaagtgggtcaggaaggttcttacttgatgaatactgtcataagctgacccttgttcttgaggggtggcaactgtttgttctttgatggtttctttagacactgccaccatcccaccacccccattaatggaggtgactcacctatggcaaatgcatctgtgcccttgtacaagtttatgtttctggaatactcatggtagatatttatgaactataccttatggtttatactcatagtattccagcaatgctccagctttatggctgaggtgtgtttttacttttaaggagcctccctggatagcccttcacttctccatactaactttctcatgcaaggtggtccagctcttacccacaagaaatgctgctgtagccccttgccctgacaaacctggggacaaactgtccccagcatcaaaatctctcatttagtctgccaccagagcagttagctagccacagcttcaggctctttagatttctcactttgtccctcaagctcctaaagacacatgtcaccttgtttgagggtcccttgaagccccctccccagggttggggtcagaaaggagtgccttcttctctccctcaagcaaatacaagcaatttaatattttttttatttcaatagctttgggaatacaagtggtttttggttacatggatgacttatatagaggtgaattctgagactttaatgcacccatcacccaagtagactacactgtatccaatatgtagttttatatccttcacccacctcccactatcctgagtctccaaagttctttatatcattctgtatgcttctgtgtattcatagcttagctcccacttacaagtgagaacatatgggtatttggttttccattcctgagttacttcacttagaatcatggcctccagctccatccaagttgctacaaaagacattatttcattccttttctatgcccaagtagtgttccatggtatatatgtatatatatatatatatatatatatatatatatatatatatatatacacatatatctcccatatttttttaatctactcattggcaattgtgaattgagctgcaataaacatatgtgtgcacgtgtctttttcatataataacttctttgggtagatacccactagtgggattgcaggatcaaatggtatatccacttttagttctttaaggtatcttcatattgttttccggagaggttgtagtaaattacattcgcaccagcagtgtataagtattcccctctcaccacaaccacaccaccatctattgttttttgactttttaataatgaccactcctataggagcaaggtagtatctcattgtaattttaatttgcattttcctgatgtttagtgatgtcgaacttttttaaaacatttgttgtccattggtacatcttcttttgagaagcgtctgttcatgtcatttgcctactttttgatgagattatttgttttcttcttactgatttaatgcaagcaacttaagagatgaaggattcttgcccacttttctttatcaaaaatctcccactaaaacattttcattgaagtataacacagaaaagtacacctatattaattgtacagttcaccaaacttttacaatttgaatacctatgcaacaagcacccagatcaagaaatagaacattactagcaccccagaagcctttcttgttgcacccttccagctactgtcccccaaagataaatgccaaattctaatagtaaagagtagcttcaactgtttttatactttatataaaccgaattgtacattatatactctttgtatctaccttcttcaacattttcatcatgaggttcatgtattgtctgcagttctcgatcatttattcgttactcaaaattgttcaacatgtgagcatcccacagtttatttatgcattccataattctcgtatttaagtagtttccagtttgggactactctgactataactggacacgtctttgggtgaacatatttatgcatctctggtgacacatactcaggatgggtttgctgggccacaggacaggtagattgtattaatactaatttgcttgggctaccacaacagagtaccttagactggataacaacagacattgattttcttacaattctggggattagaaatctgagatctaggtgtctgtagaggtggtctctccttaggcctctctcctttgcttgtagatggctgtcttctccctgtgtcctcatatggtcttccctctgtgcatgtctgtgtccaaatttcctcttcttataagaacatcagtcatactggattagtgcctatcctaatcacctcgttttaatttaattacctctttaaagttcgtatctctgacaggcacggtggctaacacctgtaatcccagcgctttgggaggccaaggcaggaggatcacttgaggccgagagttcaaaaccagcctgggcaacagagtgagactccatctttacaaaaaaaaaaaaaaaaaaacttttttttaattagccaggcatggtggacagagcgagaccctgtgggggttaggatttcaacataagaattttgcggggagtggacacaattcattccataacacatatgttcagctttagtagagtctcccagtgccgccaagtggttgtaccagttaacactccttccaggagtcaaagggagttctaattgttccacatcctccccaaatacttgatattttgtgtgttttaaataaatcttccttaaacataagctccaaatttttgtttgtttgttttgaggcagtcttgttctatcaccagactggagtgcagtgccatgatctcagctcactgcgacctccgactcctggactcaagcaattcccctgcctcagcctcccaagtagctgggacttacaggcatgcaccaccatgcctagctaattttttttttttttttgtagacatggggtttcaccatgttgaccaggatggtcttgatctcctgaccttgtgatccgcctgcctcagcctcccaaagtgctgagattacaggcatgagccaccgcacctggccaatctcccaacttttatatgctcttgatatggctgagggtcaagataatggaactggttttcacaccacctcccttgcaaaccttgtctggtagtcgtctaccttctttcagtatgtggcatctgttgccttcaagtctcagggaaactttccttcgaacagcatgtgagagagttctagaatttttgcttgtttttaatgccattacgcaaaaataagctgacaatgtttgtatgattcattttatttttgaaatttgtcccttctccggcatttcaagagtaattcacatcaaaaagaagatggtaacagaaatctctaagcagttagatctcttcattctgatgttgggactgcagctctcagggggaaacctggtaataactccattcagcagatgctgcccccaccaaccagcaccccctagaagtttctaacagtcccacagtggtggacgcttcttcagcctgcagcagtttttccttcctcagccccttcctaggtgggtagttcagctttgggttccctccactgtccctaatgggaggcttctggaagtttttttttctaaccttctgatggcatctaaaatgctgtgaggtttattccaaaataactattttaagacacttatcccgagccctcaaggaaccacatatgagtaacaagtctatgtttcatcactctcacttcccatgatcccattcccagtgcctaattcatgacagaatccatggctctctcttggctcagagaaacttcttcaccccacagatgccttacaaaggataaggtgatggatctctcactctctcctgggaaaatctaaactcaggaatttaggagatctgggggaagctattcatgcaaattagggtaattgcctataatttcaaggtgaatatctatattgacctgatattttgatatgtggttaagtttatctttaggtttcagagttttaaaactcgaacacaggaatgagactttgcactttttgggaattttgttattgttatttcagatgagctacaaaaagcagttgagaaattaacagcattcaccaaaagcaaatggcagtggttccatgtgagcatgtctccataagaatgaaacaccaagccagtcctctaaagcttttggtcagaaaacagaggaaaagaatctttccaagaggcgagataacatagttatcaactaagtatgagtaggaagacactaggtaaatatgtacgtgaagttagttttattattctacttactgcataaggcagaaataaaaagtttttaagaagtttcttttctttaaaaagaacgctgttggacatttgtcccagaaaaaataaaaacctatgttcatacaaaaacctgtataataatgttcatagccgctttatttgtaatagccgaagactggaaacaatccaatatccttcagtgggtgtaaggttatccttcagtgggtgtaaggatgtacagtggtacatccacaccatggcatatcattttgcaacagaaaggaacaaactactgaaacatggcaacaaactggaaaaatctcaagggaattatgctgagtggagaaaaagccaatttcaaaaggttatatactctatgattctatgtgcataacattcttgaaataacaaaattatagagatggcaaaaaaaattattggttgccaggggtcagggatggtgagtgagggatggatgtggctatgaaagtatagcacaaggaaatcctgtaggtaatggaacagctctgtatctttgttacacaaagccacatatgtgataaaatttcatagaaatacacacacacatacaaacacacacacaagtgcttgtaaaattgattgattatataaatgtgagtttcttcattttgatacacacaggacctccctgtacacttatctgaaacttcctgtgagtctataattatttcaaaataaaaagttaaaaaaagaagaaagctggtatattttatatcttcaggtttccactggcaaccactgagtcacattaccctgcttaacaaatggtatttccattttattttatgctatagaatttatgaattaaaatagtttagcagatacagaaaaaatatatagaaaatgccaagcctatatttgttccttgattttaagttaatgaggatagtgagatctgaaattaggaacatttaaagatgtttagaattacactttattttacatttgagcaagattaaagacacaaatcacctcctcaagaacctttactttaaatatctttcaagtaaaaattcagaattattcatcagcatgagatccccccatctcctctctccctctacacacacacacatacacacacacaagcacatgtcaaaaaatagccaaatttcaatactagataatcaccaaatttctatcagaaatgaaaacctttatgcatttcagcgttttttctttccattaaatcatagaaaccagggtaaatatttcagacttaggaaaaaatgcaataatgggatcacaggagatgttctcttcagaggtatataaactaactgtctctggttcacttctacccccagccaccactatctgcttggaggaaccatattgctttttttagtctcttgttacacattctgtctgctataccgaaaggtcccaatatagcatgctttctatagacagaaagaattctttgttaatttccacatacttcttgataaactttagcactttggggttgccaatagagtcactgcaggtaggtacctgcaggaaaggaggagggaagattggcaggtctcacattcacatcctggaggaactccaaaacgaccactgcagctgttgctttgtacgtggccaagtggagaaatacaagtgaggaaaatccagaataagttatctcaaagtataaattatcaagttgccatcaggttatataattttcctccctgctgctctcacaactgcatgccatcagagttttgaactaatatgtcaatataggggcataacgtggcttatattccacatggatttctagtttggatgtgtgagtgtttagaagagaaaattccttccttaaatcccacagcagatatgtgacagagagggcatctcttaaatacttccattaatggttttgtaccagtggctcttgatggagggaaaactccaattttgagacctatgtaatataatctcctctttgtggatgcaaattctcagtttttctatggttgtctccctaccaatgtggtttagtcatcttaagaaaggacaagattccttagtagtaactatgggaatactgttatttcatttaataccaagtcaaggtaactaagcttcccttgctcagtctctgtgtcatctatgagtttagtctgggaagatcagggattttgaagttagccctttgaacttagctctgattcttactagatgattcttacttggactcactattaacctttctaaacctcaatttcctcaattgcacactttagataaaatcattatccaaaaggttgttgtattagatataacacattaaaaatacagagagcctgtcctgcatggatattcactctacaagtggtttaataaaagctgtagttggagatggccatggtggggatggtagaaccatatttaaatgaggaggagaaaagactaccccatatcaaatgatattctaagacaatatataaataaatgttgtaaagactataagagtttagacaacagaacaaaagagaagaggaagtggccctgtaaatattcatgagatgggacatgatctgggtctggagggatgtgaagatcagaggcatggaggggatgaggatggcctttcaagtaaaaatcagcaacagaggctggaactgacagattttgtctatgaacttctgaagcattcagagacaggcatagtgtagagcagcagtcagagggtgtttatatttgatgcaagaacagataaacagccaaaagctctgcaaagctatataacatgataaaagtagcaattgctaaaggttaagagagcactgcagggtgtgtagggaaagggagagacctctacatggtgattaaaataatccagatatgagatggtgaaaatgtgtaaaggtgtagtgatcccaggaatgaagaggaaatagcaagatgtgggcacatttctaaggcaaaataagattgaggaggccaactgatgtcaagcccaaatatgagaagaatcacaggatggtagtaaagacggaacactgaagagaagatacataattaactgccttttggacctactgagtgtgaggtcatagtaaaatataaaaccagcaataattgacactgttggagatatgattggaggtgtttaagggaattaattagagaaaaagccttcgtgatcaaaaaaggatggtgattattgaaatcaagtgaaagggtagcttttccagggagagaaaataaagagctgaggaaaacagagtttctgagaaggatgggtgtgctgcagagacggaagaagaaaaataagccaactaagaaaaccaaaaagaacattcttttctgagagacttaataaggccaaggccactacatagactccaagtgcatatgagcctcagaatttatgtcttgttttcaatcacctagacctgcttcaaagttcatctgaaactttggataagcctagcataactatatgttacagagatgctctaaacagggatcagcaaactttctataaagggctagatagtaagtgtttcgtgctttgtaggccagagagtttctgttgccatgactcaactctgctgtggtagcacaaaagcaaccacagacatatgtaaatgaatatgtgcttggctgtgttctaataaaactttattcataaaaaaaggtagtgggttagatttggccacaggccatagtttgctaacccttgctctcaaatgtatatgaccctaacccaagtttcattttttttcttcagaaatccttttatcatataaggaagcaatactgcaataaaaagagcaaggatttcgaaggctgcagattttccctgcagtctgataacagctactaggctctgtatcagatgctttgagcagtttgctaaatctttctgagcctcacctttgtacttgtaaaatgagactaattaccctgacttcatagagctgttgtgagaattaatgaggtaacagagaacatttagtgtattgtggagactagccaaatgcttattcctataaacatgcattaaaatctttctactatgtcataggtgccattcaagatacagaggatacaaagataaaaagatacagaccctgccctcaacaaactatctatctggtaggaatattagttagggctcaggtgaaggaaatagaaaccacatgagttattttcagcagaaagtagttaatatagggaattagatgcttaggaaattgttggaagcgctagaggaagtccaagttctttgctggcattctagaaatgacttctgaacaagaccacccgtctgacattgtgaggacagcaactctctctctgcctcaacaagagaaggtaggcattcaggagaatcctagggaaatcattgaagtcaagagcatacccaccttagcagtgatccagggatcagaaaaccaccagcattgcaactgcctctggatacccatgtagtcctggctgttcctcagagctctgccacagaaaactcagtgtctttcacagctgtggatgtgcagcctccacctcactttctctatccaaatctcaaaaaagacaatctaatttgctgaacctacaatctagctgcaaaggagtcttgcaaatttagtttttggctttacagcctcttcagtacaataaggcacactagagacagactggaatagatactgaacaccacatactcatcaaggtagaaaagcaagcagataaaccaacaatattaggtctgaggcatgagtggaaaaaaaaggagaccaaacaaaggaaacagcacaaaggaaggagtgatttttttgtgtgattagagaggcaatatctggggttgaaggatgaatagagtctaaagaggcacatagaagaaaaacattctaagcaggaaaaacagcatcagcaaaagtgttagtgcctcttcctgtcctcattcttgaaagtgacaacaaacatcttgggtgtcaatttcctgttctataaggaaagtaggggaagctgtaaagctttctttcctttaataattattaagtaccttcaatggtctctgcaaccagagagtatgtttaaagaatgcaggtctgttttgtgtcatggatacaggaatatgctgagaggagcacagtagggagagaggaattaatgtccttaagcatgagcataaattgtggcaacacaagacagaaaatatgggactaatgtcatcagagacccaggagctaagtgaagatggtaagggaggccttcatggaatttttaagagaaggagtagaattctaagcaaagataactctgtaagcaaaggcctataggttggattttttaggcttctgaatatataagggagtagtcatattcaagtctgaaaaaagaacttaggaataatcctttaagtactaaaagcagatctaccatttgattcagcaatcccactactgggtatctacccagaggaaaagaagtcattatatgaaaaagatacttgcacatgcatatttgtaagagcacaattcacaattgcaaaaatatggaactggcccaaatgcccgtcaatcaacaagtggataaataaaatgtgataatacacatacacacacacacacacacacacacacatatatatctcaaatatatatatacaccattgaatactactcagccataagaaagaacgaaataatggcatttgcagcaacctggatggaattagagaccattattctaagtgaagtaactcaggaatggaaaaccaaacattgtatgttctcactcataagtgggagttaagttatgaggatacaaaggcagaagaataatacaatggactttggggactcaggagaaagggtggaaagagggtgagggatacaagactacactttgggtgcagtgtacactgctcaggtgatgggtgcaccaaaatctcagaaatttccactaaagaacttattcatgtaaacaaacaccacctgttccccaaaaacctattgaaataataataataaaagatttaggaatcaagaaagatcttatccttgaagtctttgtattacctaaaatttgggcttttcctagaagtaatcatttgaattatattgattatttccagaagcatgaccataatcaaaataaattttaagaacatttataggatggtgtgacaagcagggtgcagaataaaatggggagaggctggaggcgtgttaagcagctattagaacttgccatctgtgcagtagaggggtctgaactaagttgtgatggagaaagtaaaaaaaaaaagtcatgtgtacaacatattcctttttgaaatggaaggcatttttttctgattcaagcctgaaaaataagtaacatcgacttttcgacatctttattttcaagaattttactcacacatttagctgggaaaatattgtgtgatgatggccctgatgcctggtagaaggagtgagtattgctcatatctcagcaccaacatttaccggttctgctggggtcaattacttaatttctgaaattcattttcctccctgcaaaatgggagtgaagcagtgcctaatgcatagggtagttgtggaaattaaataagatcatttatgtaaagttctcagcacaacaccttgcatataataagtgctcatacagtaagtgtcttggtatcattgccatcgtcatcatcaccatcatcacaattattatgtgaggaaggtgaaatgagggggtgtagaagagtggaaagaggaagacttcagagccaaacagcctgtatcaggttcccagcaagaaacaaatggaacgctcaaatgagtgagtgatttggagaatttaatgaagaaatgactatgtttacaaaatgaaggacaagctgtagagaaacaaaaggttagcatactacctcatcctagctagagaggaaaacaggaattaccagttatcagcatgaggcctgatgttctctctagcagaaggggaacagttacaggaacttggaagaaaacagtcacgtggaaagagggctgtcataagggctgtgacctttggtcaagggcagcagccatggccacctacagtgaaggaggccgggggaagaaataccctgacctcgcctttctccttctttccagtcttctcccagcacttcacattggcagaacccaacccaaacaaaagccagaggcagagcatccctctgtacaggtcagcatctaggagcgcaaagcacgatgaacaagtgtatagagccaaactgtacagaggaataaacagaatgtatttagcacacacacccccagctttgaagctgcattgtaactttaggcaaattgcttaatttctctgagcctcaggttgctcactgtaaaacaagggtaacaataataattatgcaggtttattgtaggcataaactaagttgatgtctgaattatgcctagcagagccccaggcatgtggtagacatcaattaatgttctctaatcccacccccagctgatgacagctctcttcacttgtggctgctttacagcatttatgagcttcccagaagcaatgtttctcatcatgtggtccatagaccatgtgctttagaggcacctggggtccttttgaacagatagcttatggcccccaccgcatccaactaaatcatgagtggaaggatatgaatcttcatttcagacaaatttccccaaatgattttcacacacaacaacatttgggagccaccattccagaagtccacatttctaattgacacccacttgaataaagtataggtgagatttatgtatgcttggcagtcattaggtgcagttacagcccatcagctccatgaagaggggctagcagactaggacactaatggcctttcttgtgatgttaggtcatgctggttctccattttactgactttattaatacccaaggaacaatgttcccaggcttttaattaaaaattccctaacattcaggctttaatcattttctaggttggatatcagcttggtcagtggccagatcttaccctgctttcagagaaaacttagtaggcaaagcagaagctcttaaaaggaataaagctttttgaaagcttcacagatgaggatacgtcaattctaagtataaacaggagaaggcaaaaacttaggataagatcggaagatcaaggaccttgctttaatgaagtaaggaaaggtaccagaaagttcatcagcagtctaggacagacacagagctcatgatttggatcctgaatcggttaggattcagctgcaataagcacagactcaaaatagcagcagcttagacaaaagagaattttatttgctgctcatgtaaaattgcagaggtaggaagagcagggctggggtggtggctttactccacagagttctcaaggactcaggttccttctagcttttggtcctgccctccttagaatgaagtccttgttctcatgttccaggatggaactccagtggtcacatttatgctccaagccacaggaagaagaggggaagaagtacagagggtatggaacagctgacttttaaagaaggtttagagtcatccatccagcacatctgattccatcacttttgccagaacttgttcacatggccatgctaaactacaaaagaggctgagaggcagaatcacagctaaatattcatattagatggattatatattgaggacaaccaggagtcactaccacaggttctatggcctaagaaactttgaaacttctttctccagtagaagattcatcagtgaggttctagtcaggaacacagatgccactccaagtgtttttaaaagaaggaacataatggaaggaattgacagcacaaatgataaaagagctgaatattgaaacttcaaaactgaggcagcccagaaattagcaacagtaggaagtttctaccttccctgaagctggaaggacaaaggacaaggcagaacctcgaagtaacaggctgcctggcagaacttggaacccagtggactgttgtagtaggagctggaaccaggaggagatgcagccactgccaaagacgccaccagaagcaaagtgatatatagagagggatattccctcttctgtccctcggcctccttccaatgcttcacattggctaaaactacctggaaggtgtagcgcaagggagtctaggcaatgtcatcccaggcaaacagagtaggcaaagaaggaaaaagcactgatctaaaagcaaacaggtgagtgactggagcaacacccaaacccaagttgtggacctggatagattagtaatcactgggacctttctagacattatttctggatgaagttgatacatttgtaaagcaaaagagtgtccttctgtggaaagcagggactcaaacagatactggtacaccaatgttcacagcagcattattcacaatagacaaaaggtggaaacagcccaaatgtccatcaacagacaaatgggtaaacaatatgtggtatatacatacaattaaatattcagccataaaaagaaataaaagtctgattcatgctataacagagagaaatcttgaaaacatgctatgtgaaataaaccagatacaaaaggacaaatatgattccacttatatgaggtacctaggttaggcaaattgatggaaatggaaggtagaatagagcttgtctggggctggagattagggagcaatggagaataattatttaacaggttcagagtttctacttgggataaaaaagtcctgaaaagggatagcaatgatggtggcacaacactgtgaacgtacttaatgccactgaactggactttttttttttttttttttttttttttttttgacagggagtcacttttgcccaggctgtagtgcagtggtgcgatcttggctcactgcaacctccgcctcccgggttcaagcaatttttgtgcctccgcctcccgagtagctgggattatgggcgcccaccaccacacctgtctaatttttgtatttttgatagagacagggttttacaatgttggccaggctggttttgaactcctgatttcaagtgatgcatccgcctcagcctcccaaagtgctgggattacaggtatgagccactgcacctggcctgagctgtacatttttaaaaggttaaaatagtactttttaagttttaaaaagtttatatttatttgtgtatttatttatttatttatttatttatttatttatttatgagatggagtctcgttctgttgcccaggctggagtgcagtggcacaatctcagctcactgcaacctccacctcccgggttcacgccattcccctgcctcagcctcccgagtatctgggactacaggcgcacaccaccactcccgggtaatttttttgtatttttagtagagacggggtttcaccgtgttaaccaggatggtctcgatctcctgacctcatgatccacccggctcagcctccaaagtgctgcgattacaggcgtgagccactggataagtcatttttaaaaagaggttcttatgcttttcaaatgtatttactgattgaaaaatgcttctggagaagatgaatattggtaatgaaataatagaagctgactaatggacaaaacagtgggatcaaaagactaggaagacttaaagaccaaagcaaaacccatctctgtttctaaaaattgttgtgacatttcaaaacactttctcacagaagaaatattatctccccatctcccaaactgagcttgatatgaccatgaagcataagcataacttagtgtgagaaagcgaaggcaaaataaaaaattcaggaagaatcgagtgtcctctctttatagggagcacctgaagacttggaataggtagcttcaccaaagaataggagaagagcggagaacccgggcccacaaggcatcctttgaaggatgaagacaactaggaaggctcgatttctgggtaccatgtgaacagagaatagaggggagtcagggaatactcagctgtgtcaaaagcagcccataaatgtcatcgaggataagcactcgaagatcgttgtcgggcttttatagccaacaatgcagaaggtcattgcctgcttggctaagaccatttctgtgaaaagaagaggattttaaactggaatgggatgagtagagcagccttttctgcatttcttcctttgctggctcaagagaagcagaaacaaaccctattcccagaactatgctgacaacattgatgatggcagcacacaaattaggaggtaaacaaaacgccatgttaatttcaggctccattagaaacacagtcaggaaaaaaaaaagtcaacgtctgccaaacagaaaaggtcaaaattagaagagaaagaaattttgtttttgcgatcctaagaaggccctgccaacaatgaagacagaggaggattttgtttcctctttctcttttgtcaatcgtagaattctgaaacaaatgctcttggtaatgcctctctaatcagatacgtgaagtagaatatgggctgcatgttctttcttccggtaaatgaaaccatacagtatttgggatatcaccacaggattccattccagaactgtcttctatctgtccctaatgtacagttgttgttcttgtttataagaacctccagtaatgcttatgactttggcaggatgcataagtaccattcatttgaagactccacagcttaagttgtctctgacatgaaattggcacaacgtgtctaagagacctcaggccctttaatccctttgtagaatgtgttgcatgctccagatcaagtccaggaaatgcacacatatccttctcttgctttcctgtgttgaaggggatgatacacaaatgaaaacatatcttttgtaagttatttttaatgtgacggcagtgagcattctgggtctttgatgatggatgagtcttcacttgtaaatttaaagccatatgtattaacttagtttccttccaggcatttagtattagtgaatatcacatacggctttataatgctccaataacagatgcctagttgcactttgatttaatatatgctgggagaaaagatatatgagaatttcactataattttttgcctagataataggtcagaggttctatcccacctggaggtaaaggattggtcttactgatttcttggacttctctctggattttatgagtctatgctatctttttcccagaagcattaagtttgaagactcaatcaccaagtgcaatcaaagctacctttcctccccccaaaattaaatagacatttttaaacacacatacacatttcaagatcaacagagttcccttttgagcatggaaatatagccattgctaaattacgttactggactgaactccaggtattagttacagtggaaagtaagagattgtaggagactcttttcttagaaccaggacatggattatggcctggatttaattaactgttgctcatggcaccatgcaggctgacatttaattatattcagtttagccctttattatatatcctctcgttattctccaaatgttctaaatatcctggtcttgttttatctagctctgttgtaagctctttgaaatcagagctaatgtcacacagtacatactcaataaacacattataaatgaatttatgagcaaagaactaaatgaatgtggctacaaattcgagatgctactgttcacaatacaagatgcgaccttaacaattcaagaaaagtgaacaactgaaggtgagggggtttccctgttgttccctgaaaggcatccaaattctcctgaagctcccatgaataagatggaggtttaatttttctctctttggtcctctgctcttttaatctgctccagcaaaaaaaaaaaaaaaaaaaaaaaaactctcaaagatctggcgctagaaaatgttgtgaagagttttacctgaatctagtatctgtgtatttatatactggtcttattattgtccctagcccgagctttctaaattttctcagttttcactgccatcttctcagtgtattatctttgccttctttgtgacagcctattaagatacctgtttgaaatgagatgtttctaaaatactggtcatggactctacctgtaaggaatttctgtaagaataacataaagaattagtagcaatgattccatctgagaagtgtagaaatgcagaagaggagaatgttgacttttattctgtattcatccatatggatcacttctgttcaggagcctgtaagactttcataatttaaaaactaataaaaaataaaatatatccatcacgacagatgtcattttagcagttctgaagaataattcatgaactattaaggcagtttgcctatgcatacatttaccataaacagaagtacaacttgattgttttaagagacaacgcttaatgaatctagtcctccagctttcagagcaacttgtgggtgtccatgattaagtactggttagtgattcatcctggcattcatttatgggcttatgatggctgagctgcttttgtatctgtaccttttggctttgaacggcccaccctcagtgagcattttaataaggaagaaactgttttagtcaatgggtcaagagaaccatttccatcgtgacagctttttgaatttttccttcacatttttattctaaatggtgttcacagttgtataataacatatgttgcatgttataggtccccatgttgactacagcttgctagttattcacatctagtgaccccaccaccttttgctctttgcattttcaaaaagtttttctttctccttaaggtttttatatagtttttgtcccagggttttattcccatcttagtctatataatcctgcttctaatttgtcatcagcatttctactctggcttgttttgagtttctgcaaatggttcaactattaccagtcatctttaaaccttttaacctttaagaaatgcttacaagtgcataaaattatttgactccataaatgaatgctcaaaaatgcatgcactttttataaccatctttatgcatcatgttaaaataggtaagatgtgtttacattgtagaaatcgaaggtttaattctcagtagactaaatgcatacatactcagaagaatatacaattttatgaacatgcgctacctatcagtaatctgtaatatttaagaattaacaaaaaagatgtgaaagagactggctagataatcacttaggctggtagttctttaactctaatgtacattggaatcgcctgaagggcttgttggaacactgattgctgagccactgatctggtaggtcttcattggagcctatgaattttatttctaacaagatccagtagattccaatgctattgatgtgggacgacacactgaaaactactgccgtcctatttctcatcctgagcactcagaaagactgcatttcccagcctttaccacttctcaacctgaccataaaattccctgcatggtccttcactctctgttgcccctttcctgggcacctctgaaggccatgtattgaagatggcaacttgtcaagatggaaggtgtctaaagatgtcttaagtggatttcacagaaacaaaaaatagaacagagaataggagaaactaggaatggtaaaagaagggaggaatagggagagatttgttaaaggatacaaaattacggctagataggatgaataagttctagtgttctatagcactgtgggatgactgtagttaacaatagtatatagtttcaaatagctacaaggaggatattgaatgttcctaacacaaagaaattatgaatgattgaggtgatggatatgctaattacccagatctgatcactatatatgtattgcatcatcactgtgtaccccataaatatgtacagttattatatgtcaattaaaaaaaagtaaagaaaaaaaaggaataagcctttgtacaacaaggaactgaggtttaggggcagcattgacagacttatcccaatacccatgattttcatgtcatcatgagatgaaccatgcccagctttgaggaaacttttatgatgtaaatttgagacgagaatgaatcaatctaccattcactaccctacaacaacaacaacaaaaaactaagttggtttaggtggactcagcctacagccatatgtctgtaggccatgaagagatttttgccaattcttgctaagatctcctaaatccatcttagtatatttttgggtcatctttcatctgaacttttccaactgcctgctccttagattcctatattattttctcaaactggttctactcacatcttttctccatgttggataagaccaaggtacttttcctctcactcaaaacccattcattactggacagctctgccttgcttccctctattccccccttaccttgttctgccaataagatcatcccagagtttctgaccctatcttgattgggacagaattctcccttaggcatcttcaaagtaaaaccactggacgtgtagagacccacgtctttcatcacagtcatatgttgttgagagcagagagcctgccagataatccctgttccttaaccctatagcgagtactacttttgctgaatctcttacctgcctgctttctctgaaccctgcctaaatgttcatgctcctcttcgctgcctccaccaaccttactaaatgtgaccactagcctacttggggactctgagctcccaggctctggtaccttatttatatatcagttccctctagaccttcccatgtatcataccctatgattaaaggagtcgctagtcaaacttccttctgttatgcaaatgcattatcatcaccccttttgatgtctcccacacacagaagtggacaaaaggcaatgacttttcccagatataagaacatgtacctcctttaacccctttactgctccacactaccttatatgaaaccaaagcccaaagattatataaaaatagacaaaacagtgcttattattctgtttataagcaaacatgtaaaagataatttcagtgttaaaaagaatacaccaacaaaatgcttcaaaataccaactactgttcaaatatcatctcaatattctattacatatcaatttatagttatttattgctatgtcttttaaatatattaatatttacctgcttactctattgtacatttatgcttcatttattgaaacaattcaagcaagtgttgcttgcaatttttgttactataaataacaatgggatgaacatctctatgcctaaatctttgtgcatgtacctcatatttttaggtagattcttagcaggtgaatcccttggtaaaagtgtgtaaacaattcaaaattgtataaacaacaaactgtatttaaaaagtgtaaatgctgcaagaagtagctaaaataattagtaatggttatgtctgggtggcagttcactaggataggcagaaatcggggatcagaatcaactgggattatctagccagtctctttcacatctttttaaaaaaaattcttaaatattacagattactgataggtagtgcatgttcataacattgtatatgcctctgagcatgtatgcacttattctactggaaattcaacctacaatttatataacatgcaagggtaaacacatcttacccattttgaaataaacacaatgcataaagttgtttataagaagtgcatttttgagcattcatttatggaatcaattttatgtacttgtatttcttaaaggttaaaaggtttaaagatgtctaataacaaatgaacgatttgcccatttcctatgagccgtgcattcagcaaggaactacatatgtatgtttgacattcacaataaataccaggtaggtgtgaccacaccccacctgtcgggtaagaaggctgagggccaatgggagcatcgcaaagcagggagctgaaagaaccttctctccagcttcatctcactgctttccactgcatttaggctttcccacattcattttttctgcttctacaatgcataatgctgttttctattattagcactgcatttgacttgttctgtttctgtattatgataaaaataaacattacattatttaaaaaattatttttttcaaaaattatttgtcaaaattatgtgattgttttcccaaggcataattacatatgtaaaaaaaagtatgtgaacattttagagaatccatattctataaccatgtgaacaaactgcccttctgaaaatttataataatttacaaatctcttccctcaggagtgtgtaacactgccgttcctgtgacagcctctaccaaaaaaatttttttaatctcttctaattgagaatacaattttaattggcattcattttactaataatgtcgaattgtttttacatcttatttgctggcatatatatatgctttttaaatggacataccaaagtatgtttatccaatgtatgctgctcctgtgaaattagtcccttcggaaggtggtgtctctattctagtgacgtgaccttcccttaaacatttgggtaactcttctttttgagtgaccatcagggctttagtgacattcttttggatagtcttaggatcagttatatcatcaagttggggacaaaaatgcagagcaactgcatagtgataacctcagttttcttctgtggcacataaaccagtcatgaaatcaactgtcaaaaagatgttctagttacatggtgagccatggtgaacatggatgaaataaatgcctggctcctgaaaagcaccagtcatttgaatacatccatatggagggcttatctctacacttacctcatcatttcatagacaggcctcatagttaatatatctatattaattaatagttgtctatcagtctgcacatcaatatgccatgcaaccttaaatatgcagccatatacatcagacacttagaaatcggatcaagattgtcaactagcatgttttagaccagaatgtcattcattctaaggacttgtatctgttttgtacactgttgtatcctaggcacttagaacagtgcctagcacagagtaggtggtcaacagatgtttgttgaatacatgatgaacaaatgaatgaatgagtgagtgaatgaaccaacacttaataattaggcatcaagaccagagcttagtttgccttattttgtaggataacacaagatggcaaatgcattttgataataggtgatgaatacacaataaagataaattggcatggtagaaaggcatgtttctattccaatctcggctgtgtcagcaaatagctgctatgtcattctttccaccaatgttgactgggtacctactatgtgccttgcacttcaccaagtgctggagatatgtgaagagtgtaacacatgcaggctgtgccttcggggaatttacaatccagtgggagaaaaagatattaatcaaatattcctggaaataaatagggaattacagattttcttaagtgctaagcacataagagaagaggccaacctggcatgaatgatcaagaaaggcttccttttctgaggaggggatatttgagctgcagctagaggcagagggaacattttgaacacaagttcaagcaaaaactgaaagcattgtgcattgaagaaatcaagaacaaacaagtgtagggcatcacagagagggtttggagagcagtgagatagctggagagaaggttcttgtagctttttgttttgtgatggtcccactggccttcagtcttcttaccagtgatgtgggcatggttatgcttttctggtaggtttattgtgaatgtcaaacctacatatgtagttccttgctaaatgcatatccacaggaaatgctcagttacggtcattttactgttttttctattacctatattttgacttcataaaagcaagatctggatcctatattttactgaattgccttacttcccatcccagtgtgaactgcttagaaaatgctcaattgaccagttgcagtgggtcagcctgtaatcccagcgctttgggaggccaagatgagatgcacacttgaggccaggagttcaaaatcagcctggtctatattgtgaaacttcatctctacaaaagaaaaaattaacatgattgggtaacacacctgtagtcccagctactgggaaggttgagatgggaggattgcttgagcccaggaggttgggactgcagtaagccacgattgcaccactgcactccaggctgggtggcagagcaagaccctgtctcaaaaaaaaaaaaaaaaaaaaatcagtgacagctggggttatcattgcacttattaagcagtcttctgtgtgctaggatataacttatttttctcacctaggcttttatttaataaaaattgctgtggatttacaaaactaaattgagtttccagcatctgatactttcatatgtagaattacacatcattattatccactgatgtttcagatttgaatgtgcagtttggacatgatcttatcttcatattggcagaatattggttagttcagaggttcaaagcatctctaagctttagaatgataaaaaatgttatctatacatattggattgcaataaatatttgcatcacagcattttttgatagcaatgagaaaagtatatacagagattaaataaatgcataaaaatagcctttcaccaataatttgcagctcaaacaacaaagcaataatttagagttctgaccttgtaattcagctgattagaagaaatcagttctttttagttcatgttgtgatggagaattctaagtgaattgtatgccaaaaattgacaagttccattccctttgtatctagatgacttgtatgtcctgttttcccaattttcacgtaaaaaaaaaagaagtttgttttcttctttctaactgccagcactgtgaactaaagcgggatcctccccatttccttctccataattatataatacagttcctgctttctaaactttgttgacaattctgttgacagtacacacagagtaaaatacatcccagtcttccttaactagatgagcctaatcacttgtaaaaattcccgttaatcagattaatgtacccagatccaagcagatgctcagagagcacataacaggagaaaggatgtacgaagtatcacttttcgttgcatgaccctacatgattcttttttattttctgattattgacagtagatgtgagataatatttatactctgcatattgcaagaattttaaaaaatattttactttttatgttttcatccttctgcttttactaagaagttaagttcctgtttatcccaccactcagtccctcttacaaatacagttttgtgtgctggcctattcataaattattaatgtcacactgaaaaataccttttggaaatggaccccctgacataaaactattggtgattgaggagcttcagggcacgtgaagcactcccaacccgactggtgaagaaagctgctgaagctcttcttcctctggtgaaacaattaactttatgttccatttgctgatgacgccgcatgcctaaattgatcatgttttttaaacccatgccagtcttttcagcctgctcagctcaggggaaagtcaggatgtacagtcaggctccagtgcttttgggtagaagtgaaaagatttgcactcattgagcaagaaaatggcattcctggctgtcagtgtggaaggaagggcttttctctccagtgctgcatggcagactctctgctcttgtccctgaatgtcagctcatgcctcattgctaagtaagtgttttccccacctaacctgacaggtaggtgtctgacatgacagcaggctgccatcacactggggagcaaggataccccaaacttggagccagttctgctaagctaagtcagttttgctaaatgttactttgatttcagtgtattattagctttgagatatgccttgagtgccttagagatccagtgtgagaatggttcgctagagctggcttctgtctgatgactggtaaggggtaccacatttttcccactggcattccaaccccttcatctcttcctgccacatcttatccatcaatgggaatcaggttttgccaacagactggttatgaaaggagttgggattccttgaagaagtgagctttgagccccgagagtaggggatatcactttgagaactatgacctgcctgtacattgggggtattggcattttgcatcttcagctggcttctagcaacatacatctggttccaattttcaccacagtgttaaaatttttaaaaaataagtaaataaaggcaaactggctatggtaatcctaaagaagatataatttcctaagaacataaattgctgaggaaaaccatgtatttttaaaccaaatataaattgacttctgtatgtttctgttttcaatgttatatattgtcttttcattagcaaatattggttaaatgcctagcctgtgtcaccactaatgtgggcaaaaaaagacatttttctggccctcaagaaggtaaccatcaaagtaactttcccttcagtcatcatgaatcatcagagttggttgtattaaaaatccacagctgaacactttacactcactattttatcttgtctaaatctccctgttgtaaatttcagcatctcttgtataaacttaggggactaggtctgggtaatccttaatgtatctggaaaacattcagctggtttctgccattagcacttatgtggtcttagagatgttgcttaatgtttctgagcttcaaacacagcataagaaaaaaaaaatgcccaatttgcaaggtttgttattgattttttttgtttgtttgtttttttattattatactttaagttttagggtacatgtgcacattgtgcaggttagttacatatgtatacatgtgccatgctggtgcgctgcacccactaactcgtcatctggcattaggtatatctcccagtgctatccctcccccctccccccaccccaccacagtccccagagtgtgatattccccttcctgtgtccatgtgatctcattgttcagttcccacctatgagtgagaatatgtggtgtttggttttttgttcttgcgatagtttactgagaatgatgatttccaatttcatccatgtccctaccaaggacatgaactcatcattttttatggctgcatagtattccgtggtgtatatgtgccacattttcttaatccagtctatcattgttggacatttgggttggttccaagtctttgctattgtgaataatgctgcaataaacatacgtgtgcatgtgtctttatagcagcatgatttatagtcatttgggtatatacccagtaatgggatggttgggtcaaatggtatttctagtcctcagataatggaatgaagactaaataaagtctagactagccaagaagtagaactaaatagaggtagctattattatattgttgttttttctatgaatctgtgaacactgcctttgatccaaggtctccggaatatgtgtgtgtgtgtgtgtgtgtgtgtgtctgtgtgtttgcagttttggacattactttattattattattatattgtttattttttcataggttattggggtacaggtggtgtttggttataagagtgagttctttagtggtgatttgtgagattttggtgcacccatcacccaagcagtttacacagcaccgtatttgcagtcttttatccctcgccccctaccccctcctgccctttcctgcaagttcccaaagtccattgtatcacagaatgcattttagtaggcttaccaagatcccctgattctagcatgcagccatttataatgggcaatagaattcaatttctaaagcatcgccttgtagcacttttcctcttttatatactcacaagcagaagcacagataagaaaagaaacatactatttgctttcaccaggtgaaacaggagcatgcttaggatccattgctgagtgcctaacagggtgttggcaatgagtcagctgcttcttgttgccctgatacctccttccaaagtcactctatggaagtcactctatggaagtaactttgggaggaggtatcagggcaacaggaagcagcttgtggcttcaaccgagaaaacacatgacagtttacatgggtctttcatgttcctctagcttttctcttctgtgttagaaaaatgacagagatttttctgcgaactaaataataatagatgataatagggaagcttcaggaagttagtaaatatttcccttcagagctgaggactggcagaaaccaggcccctgaaacatcagccagaccctggaaactcgcctgatttgggctcagtaaagatatgaaagaataattagaccataaggggaattctgtgttccattccccaaggacaatgattactgactttccatgtcattcttttttccacttcctgttttttccccctttgagaacattgtttactaaatgatggaaaagaatagaatgggagcacccaggcagcctgggccataggactgacctgaggaatgcctctgctttttcatttgcatccaccagttctccctctcctgcaggcctggatggggactctctttccctttatctcaacaggcgaatgaaagaagttgagggtttttcctgtgtgttattaatctaaagaaaaaagaaaaggtgtatgtataaagataacatgaagtttatttgttagtgtccctaaaaataaacacagtgaaacactgtcaaaataggaaaagacttttaacattttcattgtactaggaactgggcacaattaaattgaaatataaatttgtaagccaacatttcagttaagctgcttatgagaataattaggccagtgaagcgaggagcaggccagccaaggaaatggtgagtttggctagaatgctctctctgcaagtatatgttctctctgtaagagttgtaaaggcatgcatttagtaaataaaacagttctacactgaaattcaaaagacactggaaaaagactaattatttttcatatttatatatttgcagtcatagaaatcctgaactggaagggattttagtaaaaccctttcctaactggtcaccaccaagttcccactcagaacttagtttccctatgagttttactttttgcaagatcccctttacaatttgaacttaagtagtaattaacttgatttatcactaagtagaaacatgatccctgaatgggagcaatggattagcatgaaataactagtgttaactctttcagttaatgtaatttaagcaaaaagcaaataaatgtgatgttttgactaatttgtgaatcatattatgggttaatatgatttcttggctttttctaagaaggaaaaatagtgcgaggagacccactgctacctttgagggcaaccagtgggtagccattgtttattccagcccacttactgtatggtgggttccatggttcaagaccaacacactacagtttaaggcacagtcaaggctagagtatagatctctcaatgtctagtctagcaccctttttgtttaactacactgctacttaataaacttgtgaggctggagagtttttaatgccattaattgcaagattttggaagtgtgactgcatttgaaagaccatagaaatagcactgtggtaacccattttcctctctggatttttcattacattttcttaatatcaaatagggcattttttatttttggtcttatgtgcagtgctgttatataaggttataatttttacttagctgatcctttgcaagcttacaagtcattgaatcttccttatttgagtcttttagtgtgaaaagtgcacacccaaacccttctgtttgatcatagaaacagacaagacctaaaaaggctcagaagatatctctcttgaatgaataattttgtaaatttgcttctttctgatttggaaatgtagttagatctttctgatctagttacatttggaacccaagtctttactctctgtatctcaaaagaagctggcaggtaactcaaatgcacagttggggacttaataaagcatatttttaaattaattaagagcacactaactttagaactatgtcctttcagaactttagggagaatgcagttggcatcaaaaaaatgataacaaaaaatacagttaccaagaattagaacaggtggcaacaacttaagtagagtgtcagcagccctgattctggttagcactgctgtaagctagaagccagcacaaatgattggtccatcacacatggcaacatcatatttttaaaccacctgagcatgcagtgaatgtgaagaatgtgttacctttgtttttaaaagccctttggagaatgtgggtttgctgaatgccacctagacccttcatatcattcaacttgcatttggaaaatagaacatttaactgcctgccattttgatctgctgctgccaaggaacctatatgctgaggctgcttcagggggacatttgtgtgatctagcaggtgtctctctttgaacctattaattaggaaaagagcagaggcagatgtgatatattagttggccctaagatggattgctctgaaaaatctcatattggcaagggtgattcaagttgccaggaatccaaagtttgctgtgtgacatccccagaagtctgatggggtttgactggtttactccaccaaatgaaactgctgagatgactgtcttgaggtgattaataaagtgcataaatcttaactatgggaagaaaagaagatgaattgatggatgcacatattggaaatgtaatgaaacaaaattgaagctaccaggatttgctaatatattacagaaaaacaatactgtgtttattgttcttcactggtcttattttgttggcctcaattccaaaatgaccaggaagacatgttaggttttatttttcatttttctagcatgggagacctgaactggcaacaaagtgggaaagtaataatgacatcatatatatgtgcccctggtatttattattttttatttctctcatgttaatgaggctaaaaaatttttaaaagattggttcaacttccatcaaagctgctattgaatgctgttagtaatcgtatatgaagtttcagtagtttttgaagtaattagaaccttggagcaaataaatactaaatggactctcatcttcaaagttattttttctaactaaatagctctgttcttgtataattatatactagtcatgaaattaaaaatcattttaaatgactagatgctttttttagaagtgtttgtttcttgctagttattgtggactaattgtagtttatgagggtcttcaaaacatctgaaattgctgccttagatttctagtctccaaaggttgcaaactttaattccaatagaaaaatacaatgatgaggaagagtgtgtaaggcaatcaaaattagaatttttgtgattttgaaaaaatctgacttttcaaagatcataacagacagttatgcagggtgatggcataaaaaaagctttattaccacgcgaacctgaatttggccccagctccactagacactgtgacctttggcatgttatttcatttctctgagcctcagtcttggcacctgtaaaatggggataataaataagtatattgcagtattgttttgagaattaaagataatatctacaaaatctttagcatggagtccatcatcatagttaatagctagtattatcgtcacttcttttcaccaccattgtaatttttatgatataaaaatttactgctcataggcccacgcttggtcttcaggacagtcagtccatgacaccttgtaccaaggttcttttttccaatggcaagtttgtatcagaacacgggatttaaattaaacaatccagaaaagcagaagctttccatgtcattttcctatccttaggggcagccatcaggttaagcatgggtagaaagtatgactgtttaggccacatatttattaggggcttttccatgaaccagcaggctctcaagagcctatgcactcataaattcatgatggtccacactttgccaatatctccctggggcaacaaggaaaacaaatgaagtgaacaacaatcacagaaaaccaaaccatgaaataacaaggaaaaccctcgagatgagcctcctaaatgtccctttccccctagtcctttctttctttcctcttaattacaaattggtatcatgagttatacaggtgagtaaaaaccgggcaccacgtgcttctgtcaggaggcagagatgatgaataccatgttcagaatttctctctaagtcccggcactatcccaaatatttttatcaataaaagattttcctttactcgccctagctctttgctcggacttcttatttttcattttgctgtcggtttaaagaatattcttcctggccgggcgcggtggctcacgcctgtaattccagccctttgggaggccgaggcgggcggatcacgaggtcaggagatcaagaccatcctggctaacacggtgaaaccccgtctctactaaaaatacaaaaaaattagccgggcgcagtggtgggcgcctgtagtcccagctactcggaaggctgaggcaggagaatggcctgaacccgggaggcggagcttgcagtgagccgagatagagccactgtagtccggcctgggcgaaagagcgagactccgtctcaaaaaaaaaaaaaaaaaaaatattcttccttactcagtttcttgtttctaggtactaagtttgttgtttcttacattccaggcacaaaatatatatattatcttaaaacaacttaattttacagctgagaaaaaatgtgtagggtcataggaatagtacgtgctagaacaaggcaggaatgagtgaggtgcttcagtgcaccttcaggcacatgagagcaggctactttcctagatgtagtcaacatgatgggtacagatttgtgatttcagatgaaattcccattacagaaaccaaattttgattctaaatgtagatgctgtggtgggcgtttaaactgtttccttaacctgacttctccaaacctcctttaccattctcaatggaatctaccttgtcctactagcacataggtgttgatggagagacacgaatccagctacctctcatgcttgttttcttcctcccctgatcaatcccctccctattcaaagcttcatggtcctaccacgctggcttcccagctaaagggagcatggagaaccctgccagtttatgacacatcgccacaggggtaacgaagaaaatgttctcatctcaataggctaagggagtggtagtgttagcctttattagctttattaagatgctggaaagaaaaagaggttggaaggatttcagaagaaagaaggaagagagattgctgagaaacaggaaacaaaccatgctcagagatgaacaagacccaacaaagaaacaagcattgccatccctaactgcatctcagagagaagtgcccaacacagcttgctttcttttttttttaattatattttaagttctagggtacatgtgcacaacatgcaggtttgttacatatgtatacatgtgccatgttggtgtgctgcccccattaactcgtcatttacgttaggtatatctcctaatgctatccctcccccctcccctcaccccacaacaggccccggtgtgtgatgtcccccttcctgtgtccaagtgttctcattgttcaattcccacctatgagtgagaacatgcagtgtttggctttttgtccttgcaataatttgctaagaatgatggtttccagcttcatccatgtccctacaaaggacatgaactcatcattttttatggctgcatagtattccatggtgtatatgtgccacattttcttatatatatgttcaccccttctccctgaccaggctcagcaaggcacttagatagccagccaactctttggtctttctctaagtatcaaaggttctcacagggtcagacttttatagtacttatagctaccaattactgtacacccatcatgcaccagatactggactaagtccaggacatatagtatcctattcagtctgttcaatagctccatgagattgctaaattattatccccaacttacagaaaagaaaaccaagtcacacagttagaaaaggacagatctggtattgaaactgagccccattatttccaaagcccatgtccatttgtgctatgccacattatctgaagcaagagtttttcaagcgtgctgttgcacaatagtgggcgttcattgaagggatggcagtggggtgggaaagaggtcattttagggaagactgttgatgccacagtgacctgagaaaatggcatcagttccttattttttaatgacaacattcatattttattaaatataacaaagcttcaaactgctatatgcattatttagctttttctgtttacctatttcttattttaaaaatccctatatagtctccaaagtttatatgatcactataacatagggactattggatctctcacggaaagttgatttcagactcatgggtacccactgtgcagtgtgggtaaaatggatttacaaaccattcagagttaggaaatccaacccagaattccacccatgtaatgcataatctaggctttttcttctggctattaaaaaaagaaagaaagaaagaaaacgtggccaagagcagaaaaagaaaaaaaaaagttgaatggggactcaggaggagcctgcctggatataacagagtataaaaatgagagggaacttcggccgggtcatttgtctgcctgggaccatatagtttccaacaacagatgaattttgattcactgcttcttcttcttttttttttttttttttttttgagacggagtcttgctgtgtcacccaggctggggtgcagtggtgccatgtctgctcactgcaagctccgcctcctgggtacacaccattctcctgcctcagcctcccgagtagctgggactgcgggcgcccgccaccacgcctggctaattttttgtatttttagtagagacagggtttcaccgtgttagccaggatggtctcgatctcctgacctcgtgatctgcccgccttggcctcccaaagtgctgggattacaggcgtgagccacagtgcccggccaattcactgcttctttaagattctcctgtagcccattttccagaaaacaatgatgctgtatgtatatatgtcacctctggcaattgcaagagcatttaatgaatttcacatcaccatttccagtcagtcttgatgttccatttttgtctagatggaaagagtaagagggactatttcagattctttgtgtatgaagattaaaggggacagggatatatcaggcaggcagaatcactcacttgtcaatctgtgcagatgttcaaaacaggatattctgattcttgtccaattcagtgtgaaaatttacagaagcatattgttatattgttagaagggaagttatgaagccatcccagccagttctgctgcaagccaggtgcacacccaaactgtaaaagacaaagggattggctgattgtttcatctgcctttaaaaaatgcaagaaacctggagctttcttcattttatcattaaggtgggcaaaaagtggccatcggggttatcataatggatccaaaagaatatacatggaagggcattatttaatgagcttggtggaaggaagatttggcagtcttcggaagttacctttattttatccattttattgtcgtgaaagctatgactcagagtcatctttgctctttgaaaatgagtccacacaccttctagaatgtgatacagtttattctagggtgccagaggacttctatataccagaaaccattatttctccacgcttagtatttttgaatgggaacatgctgtaatacgtgaagtttctgaatgaaactcctaaataatgagaatagaaccttactcttcaagcccaagttcccctgtttaatcccatattcatctgctcaatctcctctatgcatacatttgctctttaaagtctttgcccattctgtttccctccatctgcctaagttctagccatggtacaagacatagtagaagcccttcctctttacagaaggctcatcaccagatcccaggatggatctcccttccctggagttgagcacttgcttgttctcactcttgtgtttagctttatcttgcaaattagttcaggtatggcttcatcttatgtgccgattcagattgggaatggccaattagaggaggattacaaggccacttacagagtttgtgggaagaatgctgtgatggattagtcgtgtctctcttgggcatggcagcaaggaatggaatattaaggctacgtactcccttctaaaactagctcagaagtgcctagaaaataagaatctgttgccttgggttttatatctcatgcatgcctaattgctctgacctcataggagaggttcagatcatattcattgattgatgaatatgaccaaaaggtgccattaatacgttaggaataagatctaaatgaatctggaaagcagtattttggttttgtcaagaaacaatatttccttgtatacatatgtaacaaacctgcacgttgtgcacatgtaccctaaaacttaaagtataataaaaaaaattaaaaaaataaagtaccagagaagtactatgtattttcctcggtgagtcctggtcagctattgagatcatgtgaaattccacatgccactatacttagaactagattttatttgtgatatgtctaggcccatcggaatttttcttatttctgtatttaatccatgaaagcaattgtaaagttcattctaccaatgtctaatttgggtttaaatgatataattaaaggaataaaataaaatataaataaatacatatgtatacatacagctacacacacacacatatctatacatatatataaatattatggctgatataaaattaaaatgaaaagattgcagggaaccacagctaataaaaacagtctatgtgataaaatgtcataattgctttaaaacctatacatcttccctgtatttctagtctgaacaactggatggtatcaacttaagcatctgtatcctgatccctgtccagttttagcaaattccaatcacatttgaggttcattttcatttcataaagaataaccaccaccaccaccaccccagcccccctatagttacagcactcactgctgaggttaattgcaatttcaacttcaacaatttcttgaagcttaaagcaagatattgtgtgtttgaaaagcaagagaaataaattacaggagaccagaaggtagggtttacacagaagttacccttcctttggactgcagaaggaataggcaggtgctggagcttagctttcaaccaacaccagcctatacgagagcattgagaaggagaaagcctttacctaccttgagccccatgtccttggcaaaatggcgaaaacaaggcacttgcacttaaatgacccaagttaaaagttcctcttaggtgtttgaccttagatatatggtatagctgctccaaacccagatttcccctctgaagaaaagaaaaaagggaagtaatcatttttacttacaccataaggtcatgatggtcagatgagaaaatggaagtgaaaggacctgatgaactgtcactgaggcaaattaagttattaccatccagtgtcattcagctccacttggttaccctcgtctccaaataatttgccttaaaacagacatcattaacatctgtcttcagtggttattgagctcatttctgcagaaagcacctgaaggatgcagcccctgtctgtaatagtggctttctatccctagctgggggaagcagagatagagtttgaaatgacccactggtaagaaccagagatcttaatgtaaagaaaataaatgagcaaattttggagagggtaaaggacatgttagtttagaaattggagaagggcttttaaccattcctggaatcatacttggtagaggacctgcatttaacttgaccatgactgaggctactcagcactctaccatcttgtctcagagcctggtttagaactattccccatgcccacacaaaagcaggttttgagcaacttctggatttatcatgcaatttaaagggaaaactggcatgtagatgacacattctcactactactttctggtctagggattgtcactttatgccaaatgtcagcagacctattcctaaaaatgtctatatctattaaaagtcatccattcattcagcaaatattgattgtatacctgttctggagtcagcactgtgttagatgacaagtcaggagtgagccagaaggaaacagtcactgtctcatggcatctgcattccaggccctcggagccactgcacacggaaaagccatcgaaggaaggggatctcctccccactagacacatgcactgctacaatttcaaagagcgctgggttctggacttcatggcatctcagttctttccttcttactactcatcatgtgattgttctcattttctatttcctaatctgtgaaattaaaggccaaaatgagttatctaaggatcctttcaattccagaataacacaattttttgactttaggaaaatgtgtctcggtttccatatttctaaaagagaaatgatgatattttccttgctagtacaactagctgtttctgaaattgaattcagataatatgtgaatgagttttaacaatataaagagtccatgtaaacttaagattctacgaagactatgattaggatatcatcattaatatgggacaaaaaagggcagccttgccatttccgcttgaggacgcagaatacactctggtcacttaaactgaaagcatggagatacctgcccccatgcaggtggctgacgtagcctgcaaatattaagaactcttacttctagagaagctcccccaccaaaatgctggaggcccagtgcatatatagtaataaagtggagaaaagtctcagttgcctaatgagaaaatcattaccatctatgtgtgttccctggaagctaggctcaaaccagtttctcatttctgaagaatgcttttctccttcccttttgctgctgcctggagcttgcttttggaaggtaatataccattgttttatttctcctaagtttgatagtccagagtcatggctctggactatcatgtatcatgtatgatagtatttaatggctcactaaatactatcagcaacattcaggccaccttcgccatatttctattaatacagagtctccctggaggcatcagtgatgataactttgtccttgattctatctcacactcaagcttatccctgcccatgtagcacagagtggtcaaggcagctgattgcagataagttcagtgcactttgagtgactgtgctcctctccaaattgcttggcaacaaaatggcactaagggaatattttgtatttactgtgacacaataacaactggactaaaaagaatattttgactaagaacaaggacattatgctatcatttacacaggggtttgcttttggaattccttggtcagctaaagaaaatgttatggctactggtgttcttttatctgagcaattgcagtagaacaaatcttaaaagcatttattggactctgtctcccaattccctacacatcaccaccaccaaaagctcacaattgccagtcccatttgtaagtggagagaacgtgcaatagtcaactctgaatctcagtagtgttctttagaagggaatcatttgcagaccaagaaacttgccaacatagggcatgtgcgtcctgtgtttttgtgtgttgtctgaactcaagtgacctacttcaccaactacctcttcagtaaagtgaatcccactgggccaggctgttcatctcccataatttgccctgaaaagaaacattgaaatctcagatgtatgggaaacaagattgtgctgcatagaaatcagcaataatgcatcaaatatgcatgtccagattataacatgaaaatagacttctcactcatttcctcttatgcatataaagcactgacaatgcacaccacaatgtcaaaacaaggaagtggtgggcatattcacgatttcagttctgtatgtgacagctgtattcctggctacagttcaaagcataattcaaatgtgggccagaaatgagtgattcaaataaagttttaaaagatacagcatttgcatcacttctcacgtaaccatgtcttcttaatgttaatcacaaacattaatgagaagatggtgatatctgatcattacctcatattaaaagacacccaggcacacccaagtttgatctagatttccattccagtaaaaagcatgggaaggtgttagggtatttttttttcatgtgtattcaattaataatataagactactttcctgaccagtagaaagtttttaaagtagcagaactaaacaccacctgattgtaatttatatttcagaaaaataattgttatgctttctattctagcaaagggaaaaattgtcaggggtgagcaattgagctttttgaccacttggaattcatcttcgtttttgcatcggaggctgaagcagccccagacccagatgtgcaattggtttctgttcaacttcaactcctttggggaaattacactgaattgtgtaatttttttcctgaatgcccagattatataaacacacccatttcatttttaatagcagagctagggaagcccattgggaaagcatgttaatacttttttctctaaattgtattttggggcaaaccttacacaaagaaggatttagagccttttatcacctcgagtatgacaacatcttatatgagccactttgcaaatacgcatggctacgtgtaatggaaacaatgcacctttacttcccttcgctttgtactgccatattcgtctctttgatcatgtatgaagcctcaaaatagaaaacttgcccaacttagttttgcatgtttgtttactgaccctttaattttagtcatgcaaactctaaccccttctcatatggcttgagagtgggctggctctaggtatgttactccaacctggttttgagcagaaatggttatgttccactggtgagcacttaacagcagcaaatagtcagtgaccaatgaaactgaccaatctgtacttaacagcagcagctagtcaatgaccagtgaaaactggcccgtgtccatggttatggtttgttctctaggcttcccagatgctgaagctttcttgaatccactttaaatattcacattcagctacagaaaggaggacgtgtggaaagagaagaaaagagagtctttttcttaaccctttgtcagtgataaagcacagtgataaaataaggttagcttatccgtggcactcttgggttgttcatgagaattggcaaggtagtcaccttcaataacagtttaggctcagcctgcagggctacatgggctcttgcataaataggcaaacttcatgagatttactatgtgaaccaacgtcaggagatttttatgaaagacttaattactctcacaggtttaaagagtgttaaatctgagatatttggtcaaaagtaaaaatgacaattaatgaaaattgcttgccactagaacccaaacaaaggcttgctttgaaagcatttgtgttatcactgtttatgttttcccacaatctggaccctttctggagtttgctaccatgtttgctaacagaatgtgtgctaccaattagcagaattctaaccagtgctgggtaaataactacattgtttgctgtggaaattaccatgaaagagtaaccaggattgtttttcccagctctgagaagaattactcagagctctctatctggtgaaagacagcctgatttaggagagagggcagtgactatggaattagatgggcaatgtaataacctcaacatgtagtctcaggtacctcatccataaaatggtagtagtaataactatttcatggagttattataaggattaaataaagtcagtatatgaaaactatatacataatggacagaaagtattttttaggattaattccttttgtttccctgattcctaaataatatcatttgagagtagaattctgctttctttttttttttttttactcaggagacatacaaatcaaatatattactttttcctctttgtcccaggcctgcataaacctgttaaaactacataaggaaatgattgcatcaaaaccaaagtatagtcttctgtttctggcaagatgaataacaagacgtttacagaaaacccttccagtatgcacttaaatatgctagaccatagatacgatgactatgatgataaaagatagatgatagatagatagaaagatagaacagtcaagtcaggaaggatccataaatctctacttcacggagataacaaacactggcactagcattttgtgaccaaggtttttgaactcgaactatgcaccatgtgggagagagatggaccagagttaaggcctgggtggtgagtggaatagcagattgaatcagctgtccttcacaaaaaaccagaaagctaggagtccaaagggtgaaatataataggtgaattaggaaaacaaaacaaaacacagactgcttgtttgtcatgattccaggtgtggagggtacctgtagtctaattcctaagcttgtggaaaaaaaaactggagaaagagagacttcaaaaactgctcaaaaagtcatgaaagaaactgtgtgtgagtggcgcacacctataatctcagcactttgggaggccgaggtgggtggatcacctgaggtcaggagttcgagaccagcctggtcaacatggcgaaaccctgtctctactaaaaatacaaaacttagccaggcatgctgtcacatacctgtaatcccagttaattgggaagttgaggcaggaaactcacttgaacctgggaggcagaggttacagtgagctaagatcacaccaccgcactccagcatggttgacaaagcaagactctgtctcaaaagaagtcaagaagaaatatagaaaaatgaaacaaatactacaaaacaaaaaagttgtaaaaacaaatccagatatttcagtcaataaaatcaatccaactgttattgtcctctcccattaaaagacaaaagttgtcaaaccagattaacccacatatccacaatcagacaaaatccagccaaatgttgtttatgggacacacaaaatggttgaacctaaagggtagaaattttgtattccagaaaatgaagaaccttccttaatataataatatcaaaagacagaattaaaggcaacaagtagtatactagagaaaaagaagtgtactgcgttttcttcaaagttaacattcttcaggcaactataatgttgaatttatgtgtactgaatcacatagctccaaatatttaagacaaattaacaaaattacaacatatacagaaatgcacaattctaaaatatagtaggaaatttttgtttttagtagcatatagaaatctagaacaatgcaaggaagaaggttggccttatatggaacactattccaacaactggagtgtagttatttctctgagggggacatagaaactttataaaaattaatcatgttctggagcataaggtttcaacaaacgttgaagaatctattttgtatacacatgcactcacatgttcatcacagcactacttacaatagtgaagacatggcattaacataggtgcccatcaatggtggattggataaagaaaatgtgttacacatacatcatggaatactttgcatccattaaaaagaatgaaatcatgtcctttgcagcaacatggatgtagctagaggccattatcctaagcaaattaatgcaggaacagaaccaaatatcacatgctctcacttccaagtgggagctaaatgctgggtactcatgaacatagaaatggctacaatggacattggggattactagagaggagagagagggatggggtcaaagactgaaaaattaactgttggatactgtgctcactacctgggtaatgagatcatttgtatctcaaacctcagtatcacataatacacctatgtaacaaacctgcacatgtgcctcctgaatctaaaataaaagttgtaattacttttttaaaaaagcagatttttgcatgtgagtgagttttatcaagtattccattccaaagcatgtaaattattttagataatagaaaaagagagaatttccccaaacttatcttacaagggcagtattaaccttggatccaaaactaaacacaagcagtgtaagaaaataaaattacctattattcaaatacttagaacattaacaagtaaacagaatgttaacaagccatcctaagaattggttttttaattgatagagctaaatttggggttatccctgaaaacaaaattagaaaattgttcatcatatcaacttactaaaggagaaaaactgtgtaatctcaataaatataaaaaaattattctataaagttctacaaccattcatgataaatttttaacaaaactatgaatagattggaacttccttaacctgataaagtatgtctacaatagacatagagcaaacatcactctcaatggtgaaatatttttaaaagccccttcaaaattatgaacaaaacaaggatgcttgctatcacaacatagcataatatcagtgtaattttggaagttctagcctatagaaacatgggatagagcataacttgtacaccaggagacatgcacaagaatattcatagcaactttgactttcatagctgtaaactgaaaattacccaattatcctttgacttagaattgataaatcaattgtgatgtctttataaaatggcctcctatataggaggaaagcaaatggaccatatctatgtgtttgtccacatggatgaatactgtggagcaagaaagctaatcacagaatacacatactgtaacattccatttatatgcagtttatatacaaagtttacaaataggagcattttaatgtatatttggaaagatatatgtatgtaaattgtaaagaaaagtaaatcattaacacaaaattcaaagtcttggttacatctgaggagagcatgggagggatggaatcagggaagggcttgtatacagttttctctatgttaagctcgtaatagatacacaggcatttattgttcttagctagactctacactctacattttgtattgtctgtcatttcgtaatgtataaaacaaaacatcattatgaatgtggatggaatacacattcttccttgatatgttgtcctatttctctgtcaaaagcatcatttctcgaaaattgccaaagccatatgcaggaaacctcacagagtaatgacttcagtattttccttttgtgcttatttggtcaaataagaatttgaccaaattctcctattttatttttcttcacattcttctgtgtccacacttttacttatactggaatcataggttcatgtcatgcagcactcttaactatatgctcaacttggtcatctacaaatttcttccctgagctacttccttgtctataaagcagaaaatgtaatacctgcctcatactacaggagtaaaaattaaacaaaatgatatcagcctgtaatttagtgagcaccaaataaacattaactaatattgattaagaaatgcaataccttacgttgagtgcagcgcaatgatgggcacaaagtagacactggatagatcacagccactcttagtgtcatggatccaggccttgcttgttttacttttatcttgatctcctggagacaactgttcctacctgaggactgtacttgtttccatgatgctatttccacaggatacattccttgaggcaggttctccagtttcccatctgtgtgcctgtactcactaatacagctcactgttgctggggttcagaatgttcactggattgaatcaacccctccgccctgccttcctttaaggccatgtattgacagtctgtttcacaacaatccttatccaatgtctcagagttcatcatggggccactctgggagggtctcccgaactctgagctgtaccttcccccatctcttaagctgtttaaccagctactttgtccagtctgttattgtggatctttctcttaaataaaattcagtggggaaacttatataaaagctgctattacacaagtgacatatgagagatcttcaaaaattatttttgtttcactccctgatatggtttggccgtgtccccatccaaatctcatcttgaatttttgctcccataatctccatgtgccatagaaaggatgtggtgggaggtaatttaatcatgggcgtggttaccctcatgctgttctcgtaatagtgactgagtttcacaagagttgatggttttataagggactttgtgcagcacttcttgctaccaccatgtgaagaaggacatgttttcttcccctttgcttcccattcttctatgattgtaagtttcctgaggtctccccagcatgctgaactgtgagtcaattacaccacttttctttataaattacccagtctcaggtatgtctttattagcagcatgagaacagactaatacagtaaattagtatggtagaggttgtgccgctataaggatacttgaaaatgtggaagtgactttggaactgggtaacaggcagaggttggatcaatttgaaggactcagaagaagacaggaaaatgtgtgaacatttggaacttcctacacacttggagagctcaggagacaggcagatgtgggaaagtttggaacttcctagagacttgatgaatggctttaaccaaaatgctaatagtgatatggacaatgaattccaggctgagatggtctcagatggagatgaggaacttgttaggaacaggagtaaagatgactcttgctatgtaaagggactggcagtattttacatctggcctagagatctgtggaactttgaacttgagagagatgatttagggtatctggcaaaagaaatttctaagcaacaaaacattcaagaggaagcagaccataaaagtttggaaattttgcagcatgacgatgcaacagaaaagaaaaccccattttctggggataaattcaagccagctgcagaaatttgcataactaacaaggcgccaaatgttaatcacccagacaatgggtaatatgtctccagggtaagtcagagaccttcactgcagccagcccctcccatcacaggccccaggcccagaggcataggaaggacacatggtttggtaggctaggctcaaggcccccactgctgtgtgctgtctcaagacttgataccttgttttccagctactccagctatggctaaaaggggtcaaggtacagctcaggctcttgcttaagagggtgtaagccccaagccttggcagcttctatgcggtgttgagcctgtgggtacacagagatcaagaattaaggtttggaaacctctgcctggatttcagaggatgtatggaaatgcctggatgtcctggcagaagtttgctccacgggcagagacctcatacagaatctctgctagggcactgtggaagggaaatatgggatcggagcccccacacagagtccccactggggcactgcttagtggtgctatgagtagaggggcactgtcctacagacctcagaattgtagatccactgacagcttgcactgtgagtctggaaaagccacaggcactcaatgccagcccatgaaagcagccaggaagtggggggctgtactctacaaagccacaggggcagagctgcccaaggctgtggtagcatcagtgtcttgcatcagtgggagctgtatataagacaaggagtcaaaggagatcactttggaactttaaggtttaatgactgccctattggatttcagacttgcatgaggcctgtagcccctttgttttggccaatttctcccatttggaggttgtatttacccaatgcctttacccccattgtatctagaagtaactaacttgcttttgagtttacaggctcataggtggaagggacttgccttgtctcagatgagattttggacttggacttcttagttaatgctgaaatgagttaagactttgggggactcttgaaaggatatgtttctattttcaaatgtgaggacatgagatttgggaggggccaagggtggaatgatatggtttgggtgtgtctccatccaaatctcatcttgaattgtagttcccataatccctgcatgtcatgggagggaatttgtgggaggtaatttaatcatggggacagttacccttatgctattctcatgatagtgagtgaggtatcatgagagctgatggttttataagaggcttttgctcggcacttctctctcctgctaccatgtgaagaaggacatgttttcttccctgtccaccatgattataagtttcctgaggcctctcagccatgctgaactgtcaagtcagttaaacctctttcctttataaattactcagtatcaattagcagcatgagaatggactaatataccccctcttagcctcacattctttctatgcattcaagcagtttgcagaattccaacaatgaattctgtaagaagagacataataacttccccatgctccatttggtttaaacttggagctcctgtgaccctcacttacccaataattatattcaaatgatgcagtaaccccttggacttctcatgttataaatattttatcttatctcttctttatgcttgtttgttatttattcatttgctatgcattctttctcactgtgatataggatatatgtgttgttgtcttttggattataagatcaaatgcatgatctagaatatggtcatagatgtgcagatgagatcactaggaaagattgtcttatgactgtgtcattaatttcccctgtaatatccaagcactggaaagtactaaaagcacacattatgttctgtgactccccaactccccctaaaaagcctaaataaaaatgaggaatgttttctttcaatgtgctacatgtacagcaaaagtaaaatccaaataaacatttacaagagaaggctgaaaactcaagaccatcataccctgtggggaatttacaatctaaatataacaaacatatagagtgagataggagaaaagaaacgggatggtaatgatattgctggtactaaagtctattcaggaaatggaaatatatagcaagaggactcggctacttcttgggcattgatcaaagaaaaatacacaaacatataaaaggaaagaaaagtcgttttattttataacattttccttctgattctaggtgattatatagctagtctactcttccacccccaagattctggggtattttggctaatgttatttgcaatgtccataaactcagaagaagttagtattaacagggatatgaaagaacctccagttattgtgcaagaaacctcaaatccatttagggagcagacagttcataggaattgtgaagcagctcagccatgtttctgtgataggaagtaacaattactgcagaaaactctaacttattttctcctcttccaccatcgttaaaagcaatcacattcaaaaaataaaatttattgtggcagacactaaatatgtctgctgaccccagtttgcaagcctaacaactcccattgcacagatgagatatgactatagtagtgatgatttacctagccagggttgcgcacattgggtggagatgagtcttggatccagatctgtacacaaagatggattccatctgcaactaggaaggaaggggggtgcaggtgttttatgcaaacaattcttgctaactggaataaaacaaattagatgagaagaatgtagaagttttgtaaacactaccagagtattggggtcaataaaagagaccaaaaacctgattgaataaaacgtcttgcttccacctcattgcatccttgtccatattgatcagctgtaatagagcatgacagaaggtattgattgactgaggcaactctcaggtatttggaacctgaaagcagccatagactatcaagaaggcaatgctctatggaagcctaaaattagaaaggttaagtgaaaagggggcctgggcataaggtgttcaatatctacatcaatctggcagatgacttacttgaagcagaatgggcctcattttcttcacatataagttacaaataaacatgttggttattgtcttataaatagctgttgataaaatgcctgcttaaagtattttcctaggtttctatgatattgatttctaaaacattctcaaaaacagcgaaagcaggtcgaatgcacacttctacatttgtttcctgcttacacacacacacacacacacacacacacacacacacacacagagagagagagagagagagagagagaacaaaagcaaagaagaatgtgaaaggcataaatccaccaagacatggaaaataataggaaagaggacagtgcaaaaatttggagagctggaaggaaatagatacattagcaagataatgatatctgagctaaaataaagaagattattggaaagtttgagaaacaatcagatccccacatcctttcttttactctctatattcaggagactaccacgctcacactcgggttggtggctgaatatttatcctaaagaaggtagaatagagtctctgagaatggaattcaccagtcatatctgagagcaaggctccaggagagacttccccaggaagataaaattgataaaataccagaattatggagcatgttcttttttttgagacagagtctggctttgttgcttaggctggagtgcagtggcacgatttcagctcactgcaatctccacctccaacgttcaagtgattctcatgcctcagcctcccaagtagctgggattacaggtgagcaccaccacgcctggctaattttgtatttttagtagagatggggtttcaccatgttggccaggctggtcttgaactcccaacctcaggtgttctgcctgccttaacctcccaaagtgctgggattacagatgtgagccaccacgccaggccctgaattatggaacatgttgagagagaatttagacaactggtatagagtttggggctgagttggtgataagtatttaaaaaccaaacaaattaaagaacaagattatcattgcttcccagaaaaacaatagtcatgcaggaaaggaattatgatgatagtttacttcattctcagccttggatagcatttaaatagtcagtgctgaagagtaaacactaaatattgatttaatgaaaattactgtattgagatgaaagtagggaatgggaaggagaacgtgtgtgatagaagtggagggaggaaagttaaatcctctgctttcatagtgagaagtagcaatcatttagagatatggagagatatgccaaaataatcagttaactaggttagggagcagaaggagggatgttgtaggatttctttctttcttttttttgtttgagatgaagccttgctctgttgcccaggctggagtgcaatggcatgatctcggctcactgccacctctgcctccttagttcaagctattcttctgcctcagcctcccaaatagctcagattacaggcacctgccaccatacctggctaattttttttatttttagtagagacagggttttgccatgttggccaggctggtctcaaactcctgacctcaggtgatccaccagcctcagcctcccaaagtgctgggattacaggtgtgaaccaccatgcccagcctttaggatttctttatagcaaaccttgtagagaagtttgattcttttaaactgtaagcctgtatatctttaaatacacacacacacacacacacacacacacacacaacagatgggaaatgctggcaaactgtatagcataataaaggttttcaaactcattaataaaaataagatggaaatatgtgctaaaaagccaaatcagtgagaatatttgactcaacaccagaggtgaggaggaaccaagaatttgtttctccccatctcatctttcctagcaaacccactctgtccacatgctattgaggtgatgccttcatgttgagctgatgaaatgatgtaccccagcttgggaatggtaggaaccatatgtctttggccttctcagagcatttttttaaacaggttttatttatcctccactcttggttttatttctttaggataatttttgatctttcaggtagcaaaattattttctgagaatcatggcatcataaagacttgagaaattcttgggcatttatgaagtctagtaacctaccttcttcaaaatgaatagggtatatatatgcctttttcttaaaaaggctgaggtggaggagggaagagtaaattgctcatgtaccctagtaacttacattatatgatgttttatggtcttcattatggagctctatgggttttggctttttaactgacaagtacaaaatgtatatgttagtacagcatgatattttgatatatatatataaaacagaatggctaagtcaagccaactaacatgtattatctcacagttaccattttttgtggcgagaatgcttaaaatatactttcttagcaattcccaaggatgcaatgtattgttattaactgtagttaccatgttgtacaatggatctcttagatttatttctcctgttaaattaaattttttatcatttgaccagtatctcctcaacccctccaccccctagcctctggtaactgttacctttttactctctacttctatgaatttccatttttttaattccacaaataagagagatcatgcagtatttatctttctgtggctgtcctattttacttaatgcaatgtcctccaggttcatccacattattgcaaatgacaggatcttcttttttaaagacaaataggattgcattgtgcatatataccacattttctttatttgttcctcactgaccaacacttggtttgattccatatcttgccctttgtgaataatgctgcaatgaacatgggagtgcaaatatatcttcaacatactggtttaatatcccttgaatatatgcccagaagtgggattgttagattatatggtaattctactttagattttaaggaagttccataccattttccatactggttgtactaatttacatccccaccaacagtgtgcaagggttttcctttctccacatcctcaccaatatttatcttttgtctttttaataatagccattctgacagatatgaggtgtgatatggtttggctttgtgtccccacccaaatttcatcttgaattgtaatcctcatgtgtcaagggacagacctggtgggaggtgattggatcatcaggcagtttactccatactcttctcgtgatagtgagtgagttctcacaagatctgatggctttataaggagctcttctactttcactcaccactctgtcttgcctgccaccatataagacatgcctctttcccctctgccatgattgtaagttccctgaggcctcctcagccctttggaattgtgagtcaattaaacctcttttctttataaattacccagtctcaggtatgtctttataacagtgtgaaaatggactaataaaaggtgatattcatgtaccttattgtcttatattgtatgatgtcgtacagtcttggatatgcagccctatggttcttcacctttttttcaatcatgtgacttttaatctcattaaacctgtaaaccttcccttcagaaaaattcctatatacaaattttacatatactttaagagaatcacaggttctcttgatgcccattcatggaccacttaagtatccatgagcctattataagtctgatccctattatttatcatactagattctaaattagtgttgaaataaatgactgaatgatccaaagagagggaatctagttccaactgatttatttggtgaaaacaaggacacacagccaatacactattttatcttacatctttgatattcctcttggaataagggtaactcattctggatcactttcctttattgcattttggattgtgtctgtgcttgtattcacctccattcatcctgaagcaatacataaagaatgtcttctctactgtttaaactcctgaatttccatcctcaacttgtaaaaaaatcaccctcaacagtatgtcttgccattctaaaataaataaataaataatgctttattatgcctcatttgttctacatattcaagactgccatatggcttcaatggatgtctagtgaaaatatatctaatatctcataaaacctacataaagatgtcagatgcccataattaaagatgaatcctctttgagatattgctttaccaattagccacctggagctgtctggccaagtcctaaccaattagccagttgtgggtgttttgaagatgtacaagtcctaaggagagttgggaatacttagcaagcttagtagcgatgatagtgctaagataactgaatccaggatgttctcattatgaaaatgcctcattgcagtgcagttccactccctcaggaaatcaccattggaagtacctgagcaacattacctgagccctgcccttcgcaggataagagaactcgcagtcaccatgtaaggagcaacagagtagatagaagtcttgagaaggtgcttgctgaattcaccttgctctgttggtgatctcttcctttctataaaggacaatcatgtctcagtttaggttctccacttgctatgctgtcacatctacaaaatgtcattgtcactcccttgtccaacagttctccagccaggtaggagccactgagtgatatgtaacctttggtgtgccttgcctctgggagcaagtgtaagacaatgcagatgccaggtcccgttcccagagacttccatcctcactctagcacatttacttcatgttctgttttcccctggcatttcaccttcacccatttcactcttgtgcagatggcagcaatattacttttccctctagtggttttcccagccagctttagagaaccgtcagctctgagtatcccaaagactctgtgacaggttaccagggcttgcagaatgttttctagaaaaacaattttgtcttccctttttggctttaaaatcaaaaacactactccagtacctgattattcatgtcattaaagtggaatatgagaacattctttagtgcaaaaaattttgtaaaagatggctagcagtccaggatttgagaatatcctttagtgggacttgggaaggacagagagaggtggaggaggatatatgagtatttgtactacataaacacattcagagggtggtaaagatgccaatacaacaaaagctacaaggatggttatccaggaactatttgccttatctttatagagttaactagaagattgtgttgatgcttgcaagtgttcttaagaaatagagtaagaaagttggacatgagaccaaaaataaacctaaagcttatgtttagaaacaacagaatgttgtactatttcaattgcaatggaatacaactatgctttcacgaagtaaaggaggtctcaaattgcatgatgaaaaccatcatctcatggctaaggagaggagtgttgggtgcattagcagtttgtggaagctttataaggactgtttatgcgtttactgtcagcaccttgactgagagcaccatttccatctccactgcctgaccacagggccaattgctgtccacatcactagagctgcctatatgtgagcaagagtgattattcagcatcttctgggcacttacatatacaattcttccattgtattttcacataggctcctctcatgtttgttggagtctttcttctgtaattgctcggccttcaccatggaattcttaacattctagaagctagcagcaatgtctttttttattttttttactccccatctttcagtgacatttagggcagcagtgtgagtaaaaagccagcctgtaaatgtagatattgactcactaatagatttttttctggggtacatttgtctgtgcctctaaaccaaaatctcttatttaacttcagtaaaacgtgtgtctgaagagtttcacatttcccaatatccaatacttaaaacaatgccagacccctaaaagcacctgattttcttgttctagttttgttctactacatttgacagtgaaaaatctcatctttctctaccttctgttattgtttttatgtgtccacacataaggattaaaatgaacatttatttgaatacttcactttcgtgaggttttattcttaaaactttacaacttgtcttccaaccgtcgcctaaatgaagtagagacattttgcaaacaggaaaactaagaaagggcatttcacccaaactgctttaaaatatcaaaaaatatagctggagagggaatgagagataaaacaagggtggcaggcactgatggttgttgaagctgggcaatgggcaatgtgggttcatagtactatcctaattttgtatatgtttgagagtgtcaataaagcaaaagttttaaaattataaaaataaaactaatgaattaaagaaaacttttcagaagaagtaaacctcttctatgtctaatcttgggttaaagttatttgagtgcctcccccagtatagaaaatactcataacaactgagctctattctagaagcctattaaaaccttgggtagtatgtttccaacgattattacctaccatggccctaaagtcttcagatctcccttagttttcctcctgagtattccacagaagcctattttgtaccccaggaagacataaggagaagtcatttcaatgccatgaaataatctttgtcttctgttcagttgtgattattttccagtaacttttcttcattgtaaactgcttcttttccatgttgtctgtgccgccacctcattttcttgttgttaactgaagaattgctcgcctttatttagacttcagatgggcatctgctttatactgttccatctgttctgcattgtagtttctttgtaatatattaggtgcagggtaacatttaaagagacagtcaagttagcatggcccttgaggtttctttctcttatggggaagtttcctagactgttaacagaaatgtaaatggtgttttgtttccatgctgaaatcactttgtatttgaaaatgtgtgaaattgtttctcttttattctttttttcttggccttggtgtcatctcaaaactaagtgacttggtctccctggacagactgtgaaaagtcaaacacctccacaccaaaataactggtatatagtgggttgaaaattaaaaagttcctgtggattcacctgcctccctttgagacaagtagtgagtggctgttgatcagatgaaggagagttccagcctgtgacttctgagtcagtacactgggattcaaatcctgcctctgtctgtattcacttaacttgatttcctccagatttgttcatgttgttgcaaatgacaggaatgcattattttaaggctgaatagtattctattatgtatatataccacattttctttatccattcatctattgttggatactcaggttgattccctatcttgactattggagaaaaaaaaaaaagatgtcaatttaaaaaagaaaagaaattgcaaatcctacctctgcaactagactccaccaggttcagctctgtgctccataaaatgacaggactattacctaccttgcagtattgttgtaaagacatcctttgaaaaggttccagtataggacttgtcacctatttcaaaaactttataaatggtcactagctatcattactattaactctgccagtcactgagagcatgggaaagtaaaaaaaaaaaaaaaatcatgtgttttcttggttgccaaattaagttgaaaccaattttcacattaacagcaggcatttgctaactaagaaaacacagctaccaatgatgttccaaaagatggtctttgagtctgacgatcatttaatgtgtcatattcaatttgggtggaaacttttgctgaaatgtgagagtcttgttgaatttaatttttcctttcttgtctccccaagtgtcattatgtgtatcctcagaggtagaagttttctgactggggcttggttaggacagaaatttcatgctttgattttgctttgtgtttgaggttagcagtgaagaattcaggagaagaattgttggatgctctagggaaaagtgtagacgtcaccttagttctgttatctgtaaaattgaaaatgacaaagtacagcagtgctaataagtggtgctgtatttagttgagctaaaaaaataataataattcactacttctgaggaaatcggagcctttgatgaaaacagctttttgacaaatgaaaaattttaagactaaaattttattgtaacatctgtattcactcatttacgcttttaacaaacgtttgttgagcatcttccctgggccaggcactttgttagagactggaatactaaaatgagtaagactgttgtgaaaggaaagagaaggctcaatttaattctataatttgataagagtttcagaaaggggctgattgcaaatgtatagactggatttagatgaagtcacaaaagatggtgcagtacctcaggggtcataacagcggggagctgttaccactccttggtctaactgaacaaagggaaggggtgtgtccttcgacctggagagagaccagtatgaagaaagtcacctctgggagatgcaggcaacacaggatagcctgccaaggaggtggctaaagaggatagactccaatgtcactcttctcctgccttctgaaactcctgctggtactgcccatcagcaaatccccactgggaggtagaaggaaagggtaatcattagtacaattcacagaggtcaggcctccagggcatgcagcaaggcagaaaagttggagaagggaactggaaagagcaaagggaagaatccagcacaactaggaactccctcaggatactctatacttggtgcaatggtagaagactgacacacaagcagatactttttaataatccatagtaattaacatactgatatttacaaaataacataataacataagagcccagataatagagctactagcttcagtattagagggctttattctgcatctcaaaagatgagtatgagtttttctgctgatgggagaaggaggaagaatatcataagggacaaaaaaaggcaaatccataaatcacataaatatataaagcttatttagaaatcatcaggatgaccaaagcataaggtatatggaacacaggtatatgggtttgggattttgtgagactttgttttgattgttggagaatattacccagaaccaccacaccatgtttaatacgcaagtataagctacttgtgacctgccagcttcctgagaggagacgtctgttttgttcaccactgtgcatgcagcacctagaataacatttggcatgtgtgaggagctcaatagctacttggaaaatagatgaactggcaaacaaaagaactcctctatctgaatctaagtcccatgtatttattttaatgtattaacattaaacttgaaatgtactagcaaccaatactatgttgattcttccttttttgttctagaaataagcaggtctaaagaacggtggttttgtgaaacaggtacaaagtggggagtaaggacatctctttttcactggaaacatcatttagccttctgtttctcagctctcctagtacagtaaaattgaactctctccctcagctatctcctgaggtaatcatgaaaatcaaatgagatcaaagggaccttgacaggtgaaaagtgctggacagataggatgcagagatgcctcctccttcagcaacaatagaaactgagaggggccacataagcgaatttttcaaatgattaaattgtgttccactaaaccagggtttctcagtctcatcactgtgcgcacttagggtcagagacttctttgttatgaggacctgacctgtgcactgtaggatgtcttgcagcatccctagcctccacccacaagatgccattggcactaccccactgccattcccagttgtgataagcaaaaatgtctccaggcattaccagatgtcccttggagggcaaaattgtcaaaccactgcattaagcattctttttcaatcttaaccattctatggaaatctttctagaatatgttggtcacatttctggcctgttagacataggctcctggattgttaagctagagtactggctggaacagttataacagcttcaagacctgttagaatgatttgcctacatctctagtccactatgcttctgtaggtcctgtgtctgtgtttcacggtttttgttttcactctcactcaccctgtgtggctgatagctgtcatttccgtataagtatcaaagtgtactaatttgctatttctagtctgctgaggatttttaaagtggtcagccagcttttcatagaacacatctaaaatgagaatccacagtccctgagtttgggcctgggtgtgcaggggcctggcagatgagcgtggtttatttgagtcaagcagaggccttctcatttctcaattctcaactcctttcctcttagaggcttctgccaggcaaagctggtatcactgcgattactattaatgtcactttatggtgttacctatatcgactttcccatatcctcaatttagagtaagggacagatggaacgtctgataatagttcaaacattcccatcatttgtaaacagacctttcagggagtaattagtcttattttgccaccaccctttttactcctgcttccatgtagaaatcatatgagggggggtaatggatcaggtatatgatctatgaggctacacagaacctggtataatctaggccaataagatattctttgatattttaagtaaaattcagtgtattagcacctaacatagtggcatggtgccaggcacatagtaggcactcaaataataacaataattgtggaaggaaacatatgaatgaatgacagaaatatagtctaactccccaatcaccaatatgaataaactcatgtaaggtgtggcaagccacagataaggacttcagaaatccagatgaggaaagtggtttataatgaaagcacaggctatctttcatgttacagatagagagagaacaataatagtctcagagggagggaaaatgaaatgactaaacttcagcccatttcctgttctgctgcagttctcttttaaattcacagattgggaatggcccagtacattccggctcttagcacatactcacctccttttattttctccattgcaaatgcttgtgcctttcaaaggacagagagaaaggtcaagactctcagcatctgcctgacaccggtggatagaatctctggtatctctaatggtctgcttaaccaggttgttaggctatttctgtctgccgtagcaaggaatattccctcatgccagaataaagcaacctgtagtggaacattgacctgaatggtgagcaaggtcaggagaaagcattttatttaaaaatggctctgtacataataaaaaagggatcagtgtctaatatgactgaacatcgggagaagaacagcatttgatttgctgcattttttcaaggtcatgactggtcttgacagtccctattggtgacagacttccagatggtgtgattctggaccagccaggccttcccctcgagaaagaaggctaagactgatcagtttccaccacccagcagtatgaagcctgagaccatcctggtagcagatgatcctcagagttgggcccagaatgcaggctaacctgtgagtgtcccctgaattgaatgacccagggatgctgtaacttgtacttgcagattccgtatggtcatttcatacggaaggaggaggagttctgttgaagagaaatcaagacaatctgacctgaccagagtcaagaaaatagccagtccccaaagataaagaaattcttggaacacagtaaccctctattggtattttcaaaaaggcaacattagtcacaaaagatctctgtgtgtctcttggattctgccgtctcagcatttcagataggtcactggttaatgggctgggttaatggttctttttttattatggtgacttttaaccacctttctggcagaaggtgtctgattaaatcatggacagctgtgggttaaagatactacttctctagcatttagttccccttcaaacagagcaagaatgacaaggagggaatttagaacatggtgggtatttagctttgttttgtctactttcataacagagagcagccatcagtggttctgaatgtcttttctaattggatgcctgcagggtctggtatgcctacaatgtcttgaggccagtgtgtttgcagcatgagcaagcagtagagtgttataagatgacttgggctcaagtagagctcacgattagtaacctagtaggaaatgaggaatgcagaagtttagcaaaacaggagtgttacagttgctaaattctggactgaattcttgctatctgcttgaatccaaagtatcctaaaagactctatgaaccaagaattccgtagctaaaaagaatgtgtgcgtgtgtgtgtgtgtgtgtgtgtgtgtgtgtgtgtgtgtgtgtatcttatgcagatatattacattaagaaggtcctgttgcccattttataatcatttatcaagttctgctaggagctggccatttacatatatgtgatttaagagagttttttatactcttttaagatttgaatcattatctttattttaaagatggtaaaatgggaacttcttccccattagtactttacgcactttgaactgaaacttgacctatactgaggctttatttgggaatggcagagctaaaattggagaatggtttttctgattctcttttgttcattttatcctagataaagttcttcttatattttataggttaaatttatttttgaggggtagcctgggaaactaaataccaggaataacactgcttcaatgaggaaatatgttctcacagcagtgtgaaaaggagtcattaaaacataacccatttgtaacttgtaggctaaccacatgtatttacactagttatagggaatgagctctatatgtaataatgtaggtgcacatatccatgtatatggtttatttatgtaccatttatccaccatacacaggaaaattttgtgaaataataaatattgaaagtgggcaaaggacatgaacagacacttctcaaaagaagacatttatgcagccaaaaaacacatgaaaaaatgctcaccatcactggccatcagagaaatgcaaatcaaaaccacaataagataccatctcacaccagttagaatggcaatgattaaaaagtcaggaaacaacaggtgctggagaggatgtggagaaataggaacacttttacactgttggtgggactgtaaactagttcaaccattgtggaagtcagtgtggagattcctcagggatctagaactagaaataccatttgacccagccatcccattactgggtatatacccaaaggactataaatcatgctgctataaagacacatgcatacttatgtttattgcggcactattcacaatagcaaagacttggaaccaacccaaatgtccaacaatgatagactggattaagaaaatgtggcacatatacaccatggaatactatgcagccatgaaaaatgatgagttcatgtcctttgtagggacatggatgaaattggaaatcatcattctcagtaaactatcgcaaggacaaaaaaccaaacaccacatgttctcactcataggtgggaattgaacaatgagaacacatggacacaggaaggggaacatcacactctggggactgttgtggggtggggggaggggggagggatagcattaggagatagacctaatgctaaatgacgagtcaatgggtgcagcacaccagcgtggcacatgtatacatatgtaactaacctgcacgttgtgcacatgtaccctaaaacttaaagtataataataataaaataaaataaaataaagaaatgttaatagcagctgtccccagaagaattcagggtaactttattttgttgttgttgttgttcttgttcatctaaatttggagggaatggagcataccttatggtttttttagaaaacataacttatgaaataaagggtaaggtccacacctggctctttttagattcagagatgtatttgatttttccctccttctgtagtctgcccccacggtctgtattggtttcatcacagtgatgcggcttaagctatggatttgaaagtgattctgtgagcttattaatttaaagtctgtgcaggtgtcaggattccaaggcatcgacttaagagaatcaagccacatcatgataattaggattgaggggacatttgggaaaggcattggggaaagaaataagggaaaccaaatgtaaggaatagaaacgcctgatctgtaggactctcaagcaggaggcattggttttagggaatgggtgagcaagtagagaggtgaaatcaatgtgggagaggaagaaaaggcaaatttcagagcatgagagggcccagagaaagatggaaaatcacaggccaaggagatcaaggagggacaagtcctgacctgaatggtggaaagctgaaggaacagcacagccgtgcagtgggccccggagtgttagaaaggcctgtcatgtggtgtggccatgtaggaagcagagggactctcatgactcatttgtcatgggaagaaatagggtgaggaagggggaagtttgtgtgggaggaaggagtgaggccccaggacagaaggaatggaaacaatttagatgcgtgttattaattattgtctccaaaaagcctggtgtggcgagatggatgatgacacaggagatatgacttaagatcacttccagcatagctcgctgtgtctttctacgcggcatgaatcaaaatctctggaactttctcgtttccagcaaggaggctgcagcactgataaaggctattgggaagattaagtgttacatcactgccatttttgcaactgttcttcaccctcctgtcaacccccggctgaaagaccccagggtggaaacgttcactgcagcctaatacttgacagatagggaattgactctagaatgatttttcaaaacttaagttatgttctgaaataagtggttaatggacctattcccatcaccctcctctacgtctttcatcttttgtgcacaacagatgtggccaattttcacacggatgaaatctgctttgcttgaaggagcctatggtttaagtattattattgttatggtggtggttgccagtgtaatttagagtccacccatgtctaaaaagtgtttgagacaattttcttggatacaatggaccctttcaacaagagtgaaatgtaagaactttttaacagaagagatagttataaactgcaagcccaagtgttacatttctcattctgggcattttcttcttggtgcttagcaggcactcagtaaatatgttggaattaagaataagtgggttttgatttcgcagaaatcacctctgtgttgcctttcaatgttaaatccattgataagattgtcttccttttctgggacctgaccttggttaaaggatagtttagttggttaactcacatttatgcaactaactgaacacacactaaacttcagagatcgtgctgagcacagaaaatgcaccactctgacatgccctcatcttagcagcagcaacatcaggaacacagtttcctaaaatgcctgccattgtcagcattgatactaaagacacactgatggcctgctgtttgcaaggcaactcactaggccctgagatacaaagagtttataatatatcctcataaatacaaaaaggtaggacattctatttaaacataacagtacatagcacacaacattatagtttaagatagtttactgtagataatttatttaatcatggtacagaaattgtatagaatatgtattgcccctattcccattttggtagtaagaaaaccaaattctacaactcagaacttgggaacatgacttactctagatttcaccttcatgcaaagagagagctaatagtacactgcctttctgcgagtttctcattgaaatgccaaccatacctactctacttagttttgctagaaacgaagattgggaacattgaatgtgtgtgatctttagctggctcatgaagaaatatccagacagtgttccatctctcactaaagcagccacattggctgagacattctcctacctctttaaggggcttcaggtctccccagccaatgctgtctgtgatggaccctggctcagctcagattctttctgtgtgggctccctcaccacttctcagcagtggtaccacactccactcatctcactgccatactcagcaggaatgcccacaggcctgggactgctgccgggactggcagagaagccaggttcttacaaaggataaaaggtgggacttgccttatcccccacagttgacttagatttcagctctttggagggaggacagagtgcttgggccaccagtgagctcccagcgccttctacactcactgcccataataggcagtaaatctgtgtttggtaaatgaaaggtagggaagacaggaaagggtgggaggagataaagtgggagaaagagaaagaggaaggaaaagagggaatgaggggagagaaaggagggagggagtaagaaagagaactgggaaaagcaagaggagaaaaaagaagggagcaagaaaatgaaacaagcaaacaaaggcagctatcaggaagtgctgaactggatgcggagcaaagatgactgctagtcaagagagcactaccaagacaggagaaagatgataaggtgctcctcctggctctgccaatgacaagctgtgggacctcggacaagtcactcatcctttctggaccacagagtaagacctcatttgtaacaggagggatcagactagatctttggacagacccctctctacatgagcatccctgtctccatcctggtcctccaagcattagcaaaagctaccttgcattcagcactctggcccagaccctctgcattttccccagccttcatttcttaccaggcatagaagtactctaaatgagcataaggaagaaaacacaactacagttttcataggagctaaactgcagaacacagacaggattctagaaggacaaatcttatttcatttagcttcttcttaaagccaagatacctgcaaattcaaaccttaggttctgccctctgcggcacccaggcagagcctgactaggaaacttcagagaggagaatgtaaaaggaaatgtagatatttataattgaagtatctttccccttgggtatttctctttctctttttttttttaatgaaaattcagtcaactgaatattttgtttccccgaggaagactcctcagctgtcgattatgctgagcacacgggagaagctctaacagaagatgatgcccgctcttggctaatgatcaccttgttctgtatcagtgagagacaaggtctttgaggttggccccctttcagctgtgaattaggtattaggtacggaatatagctaaaagcattttgtgtgagcctgcaaaccaaatggttgctggacccaattttgtacaggtatatcaaataaatttaatttccccattgaaggtgcttgcttttaattctggggccagcaacgcagaacagttttgcagattaaatttccattccgagaaagaagtagtcagggataaaacacacgtaacccaaaagcaaaaggtttacagtgcacacagcaaaggtgggggcgtaaaaagacctggtgaacactagacggactggaaaacttcgggtgcaagattacctttgtcacctcatttcaaacctcatagtcaccttatttataaccaaaaaccagggcgggctttgatgccctgattgcagcaacgggattctgctatcatttgagatgcctggtgcttctctgtgttatgtgtggactgaagcttagctgcccggttttacaaccactactagaaaatgcacctgaatcaggtttaattctaagaccaaactcaagggttcttagtaataatcatagatcacttccctcaaaaagcctttcctgatttctgctcctcacccacgaccacttgaccactcctcctgtttctcactcacggcacccctatgcacatacctatgaccacagctatcggaagggctagtgttgcctcaggattaagctgtgcaaccttgggcaagttacctctgtgtatcttggtttttgcattttaaatggcagtaataatagggtggtgaggagtgagtgtgaaggacttagaacactataggacaaggtaactatttagtaaatatggcagtcctgtgtaggacagactctctttgactccctaggatttaccccagtgcctagcatgtttcacagcttagaggaaaacaacatttgttgactgacttttgatctccattttttggtgagatgcagtggcttacacctgtaatcccagcactttgggaggctgaagcgggcggattacttgaggctaggaattcaagatcagcctggacaacatggcaaaaaataccaaaaataaaaaaaaataaataaataaaaaatttagccagacatggtggcaggcacctgtggtcccagctacttgggaagccaaatcgcttaaacctatgaggtggaggttgcagtgagccaagattgcaccactgcactccagccttggtgacagagtgagaccctgcctcaaaaaaaaaaaaaaaaatccatttttgccttcctggcattttatactttaatccttggggtatttgggggcattcaccacaattaacaagtttagattggttctatttgagtgtccatgctgcatgccaaatactctttcaggtactttgtataaaatattctatttcattcttacatcactcccttatttttcccattcttaatattaggaaagtgaggctctgagagtttaaagaacttgcctaaggctggtaagctggtatttgatgagccaggattcaaacacaggacgtcttatctctattccatgggactcctgcacataccagggatctggtaattcaatgacatgttggcgtgccctgcctggctctgcctacccacgcagaccactctcctcacatgatctgggaaattcctaattagcctgactggctgagcctcccattccaaaggccagaaacttagtctaagtgaagacccaggtgagatctgctcagcctgatctccagcctcccatgcattcccgcccccaacatcgggggtgtggattcacctgcattcactcagaggcttctgcctgctgatggtcacccaaatagtgatgaggccaacagcactctggatcttacttaatgccttctccaggaacatccacctatgactccatcagaagttcatgatgttgttgaaaaataatcccatttacagtttacattgcatctaaaatcactctaagggcctgtggctgctgcttagagcaaaagcaaaggaggcctgttttcttacagacaatacacaggaatcctggaattattgcatgtcttttgttagtgagaagctacctgtcattagaattacctttcttactttctaaaacacaaaatcttttagaagatactattgtatagggtatataaaataacttgggagaccagaaaccacagctgaagaaaattgtgtgtgatgcatacgtacataaagtcagctcttcaaatccgtgggttctgcatctgtggattcaaccaaccatgaatcaaaaatatttgggaaaaaacttccacaaatttccaaagatcaaaacttgaatttgctgtgtgccaaatactaggttgaatccacatgaatgaaatcatgtgtaggtattggattaggtatttattataatctagagatgatttaaagtatatggaagtatgtgcatatactggaggatgtgcataatataaggatcacaatgagcagtaatggaagagtactttttagtgtaagaaaatgattaatcatttggagttaggctatatttgtggtaagcaagcacagttcctatagtatgtaagtttcatatctttcatttccaaatactacattgaatccacataaatgaagtgatatgtaagcattgtattagatattataagtaatctagagatgatttaaattatacaagaggatgtgagtaggttatatgcaaatactgcattgttttatttcaggaacttgagcattcacagattttgggatccgtgggggatcaatgactctacaaatacacacacacacatgccttttattttataaaatgaaataactgttagtttatgtagtattttggcaatggcagcaattctgttcagctgatggtccctaagcatgaacagattctcataaataaaaagagctcatagctgtattgatcttacactgcatttgttttagagagttgagtattttaaggtggtgtatgttaacaagttgaaagagtgcttttataagaatgctttctggggctttttgtcagttagtgctgatcgcattttaattggcttccatttgttccatttgttttcagaagagggtgtacatcttctgatgtataaaaaaaaaagtcatctattcagtaatcattttttttaaatagtggccaaaacagacagtgagctaatgcctaatgagcgaatatatactcatgattgccataagatcctttctgtgcccatggcagacatcagacatcaatctgagcaacattagcattcttctcaacaccaccctccatccagcctcctccaatccatcagtgttgaccaccagcttgactgctggactaacaatccttttgtctctccacagtcagagccaacgtttgtatgagagtagccaagagcaagaacaggactccgtgtgtaatgtggcataatgaagatagaaatatttgctgtggaaatcacaccacatgatccctatattgggaacagaagtggaatagtagtgttttgtataagaaaatgattaattatttgaaatcaggctatatttggggtaagcaaagcacagttcctacagtggaagaatttcatgtcttccatggtgaaatgatcctaccagtccatttccagagaccctgtccctttctgcagtgtctttatctcttacctgaacttttacaacgatttcaattaacagtgaactctgagagcaggatctgtgtctgttttctttatccctgttgtatgtgactgtctggcaccatttggcatagtgactgagcatgaatgaattaatacccccaataagcttcctgcttctagtatttttttcccattttaatctgtcttaatttataagattaataaatcttttcttcatttttaatcccagcactttgggaggccaaggcaggcagaatgcctgagctcaggagtttgagaccatcctgggcaacatggtgaaaccctgtctctactaaaatacaaaaaattagtcaggagtggtggtgcgtgcctgtagtcccagctacttgggaggctgaggcacaagaattgcttgagcctgggaggtggaggttgcagtgagctgagatcatgccactgcactccagcttgggctacagagtgagactccatctcaaaaaaataaaaataaataaataaataaataaaatttttaaagttttttttatttttaattgacactaattgtatatatttatgtaatacaatgtgatgttccaatacaagtatacattgtggaatgagtaaatcagactaattaacatatctgtcacttcacatacttatcatttctttatagcgagaacatttaaaatccattcttttagctactctgaaatacataatatgttattattaactatagtcactatgctgtataatagatcaccagaacctaatccttctatataactgaaactctgtatcttttgatcaatgtctctcctttccctatccgtgcccctccttctccccagcctctggtagccatcattctattctctgcttctatgagttcaacttttttagatttcacatataagtgagatcatgcaatatttatctccctctgcctggcttatttcacctagcatatgtcctctaggtccatccacgttgttgcaagtgacaatgtcctactttttaaagcctgcctccagtcttgcttcctgtaatcttatcctccatattcagccatatgcaaatctagacacaccactctcctgcctaaaactttgtctccttttcacctactgagggaaacccagctcctcttcagtcacgttgccagccagcaaagcattgcacgttactatctagtaacaccaaattatttgaaatttctcatgaacgtagtttctgcctttgaacctctacacatgttgttccctctacctggaaatccttcctcatctaactctagttcatctttcaaaactcagataaatcatcatttacttagaaatcattccctgtatcccagaattgagggtcaatgcctcttctctaaaatctcatatcactctactcatatttatatcatagcacttaccaaatattagaatgatctatttttatatctccttgaaatgatatgatgttttttctgcatgttacagaaagtccaactcaaactggaatatatgagtacacataagtgaaaagagataatgcaagtttaaagtacagtttgatttaaagtttcctagattattagggtttcattttcctgtgtttcccttgaccctgtcttcctggctaacttagattaatgccttcatgatatcaaaatgatttccacagttccagcacaagtttcttcactgatatcttgatgaaaagaaaaaatgtctctttcttttacaagcagacaaaagctccacacttcctctcactggatcagtgaaagactggtgcccattcctaaaccaatcactgatgcaaaagagatatgagtgtcatgattggctcagactttatggctggaaagttcaagtccttgcaggatggtgaaaagaataacagatactttggaggccactgacaactctcctgttagactaggctcctaatggtcatgcgtttcctgccatattcatctacgggttcccaacatgtagcacagtgtttgatacccacatagtagataatcaacacacatctgcttagctgatgagaattgagcctgcctggaactgaaaatcacattctatatccacgcttccctctccactttagctctgaagtgctaccaccgtgctgcctacctcctgcagctgcttctcaaccttcttgtaaatgaatccttctgcctaaaatgggtttccatttgtcttagactaggttacattttctcaatcaaaattcaacttaacccctccccttccaatcccagaaagatctgcctgtttagaggtactctgagacttcccttacaactggaaaattctgtgataaatgcaagaagctgtcaccagaaatgatggaaacatcaaaagagaatgttttgccagttagtccctttttattaaatattccctgaaggcagctactatgtatcttttgattattcctataaaagaaagagtataaccaagtagaaagagactagactttggaaacaggtctgggtcaaattctggtaccactacttcttcactctatgaaatgttgcccaaatgatttaatctctctgagctcagattcctcctgtataaacgggaataataatctccacctcccagggttataagagttacataaaatgaaccgtgtaacgtggctgggacagtttatggccaaattgttacactcccttcctccccttgcggcatccagactatattaccggtaggcctaatgtttttggttccataattcccatcttcaggtgatctaggctgttgaataagttcactgttgctggagaagctcttctgaaaactgctctgacctcagtgtctaatcacagaaactcgaggcttcttagtaaactttgatatcttgtctccaaaaaacataattatctgcctaccttggcatgccctggttttgtttgcctggtgaagcagaaaataaatggcttgccagcggtggtcatgatgaagacctagatattaaataagatgggtgtgaaagtcaggattgctgtggattcaaagaagccttaagtattctcagagttcccttaactctgggcttccacacatgctgcctctgtgatataaaactcaccctcctctcctatttccaaaaataaaccctattgagaatgtgtgccaggaagagaagttgtctgtagaccttcagatttatccttggacatccctgtttataaaaccctacacagggctagtgtctggtattccttcagatatttatgccttcttttggtttctctctataaattctccttctcctttcctagttttcgctctactttccttctgggcacaaaacaaaattcctcttactatctcactcagggcattttatcatcaacttttatggttttgagcactagtcctcattctaccctgtagagctcatcacaaaattttatccaacaaagatggttccctctttcagaggaattttaattttagctacgataatcattattaacaacatatgtatttcatctatcaatgtgattagattttattccttgtgaaaaaaaattacagaaagggccacaccatggaaaggactgcaaatgtttcaaaatcccagtgattaaaaaagccaatggcattatttgacacctgaatggaagaagacagatatataagtgttccttgcaaatggatttctagcaggggaaaagagatctggcagttcctagagacaatggtctttagccacccactaagactaggttctgaagccaggctggattaaatcttcaatctgctccttactaactgtgtgaatttgggcaaatttttaaactgtctgtgctttaattttctaacctgctaatattgataacaagaatacccatctcaaagggttttttggaaagttaaatgaattagcacctttatatatgcgcagtatgtactccaacaatggctgctggttgaagtaaatcagggatcaaaaagtcatgatgtggtcatgatgaagacctgtataagatggatgtgaaagtcagaattgctgtggattctaagaacccttaggtattattctcagggttcccttaactctgagatataaaactcggcttcatctcttatttccagaaataaaccttgctgaaactgtgtgccagggaagagaagttgtgcatcttgtgggagccaatgaaagaaaatcattgtcccaatgtgccattttctctctcttcatgcagatttctttcttttggtaaatacaactgccaaaagctcagctctttaaagttttacacctctccatttccatgagaagaacaaccagaagacttgtgtcatctttcagggacataatccttcaaagtttcacactctgggtatgtgtgcagattactgagacaggaaaacatgacatatatctccaggatttttaagtaattttatatgaagttgtttccttcatataaatggaatgcagatccactgtagaaagtctagaatatgcagataataagcaaaagaagaaaataacagttatatcccgtgccagcacccagaaataacaactgttaatatttcattgcaaatgcctttgatctttcaagtgtatatgtgcacctgagtatatagttttttttaaaaaaaatggagtggtacagtgcatgcaggttatctttttgcatctcaggtgcacagagttgagttagcagtgctacttgattcatggcataccattttttcggctctttcaagggactcttgtggatttttcccctccttgttttcaaatttcacatctgttccctacccactaatgcaaaaatgccaatacatttgatatatttttaatatatactattgagtgtggatatatatgcaatccatacaaatgatattgtgctctaagacctcatcgtttttcatttttattcaacactgcttctgaaatctaaccatgttactatgtgtacatctagctcaaggttctatttgatgcctagcattccatcacattttacttacctactaccctagtcaaatacatgtgggttgcctcatataaataactgggaagaatttatctgctttagaccaaagatggagcttcctggatcatagagcaggtgagggcctcctttcactccatgttgccagattgtagcccagatggggaaaccattgtctactctctgcagagtgcatggcattatccagatttctaattttggccaatctgatggatgtaaagttgtatctgactgttttaatgtgcattttctgataatcagggactttgagcatagtttcatactccttagccagttacatttctcattttgagagaaacctgtttaaatccttagatttggaggcaggagtggggatgtggcaggggcagggaaggtggtcatgccttttttttctgtttatagcagtcctcacttgtctgtgggagatatgttccaagaccccccagtggaggcctgaaaccacagagaatatcaaaccctatgtttgttcctcagaatacctacctataataaagttaatttataagtttagcatagtaaaagattaacaacaactaatataataggacaattatagcaatatactataataaaagtaatgtgaatctctctctctctctgaaaatatcttattttactgtacctactgtaccaaggataactgcaaccatggaaaacaaggcctcagataatgggagactaactactggtatttgtctgattttcttgtgattcaagatacctactttaaggttttctggcctatattttgacaatctgtcatctttgtgttaactttctttcttcagttcctttgccaaatgtaaattcttaatttctcttttatccatacagttttattatttacacttatggggccaagcctgtaattccagaactttgggaggccaaggagggtggatcacttgagcataggagtttgagactagcctgaacaacatgacgaaacactgtctctacaaaaaaatacagaagttagccatggtttggtggcatgtgcctggggtcccagcttctagggaggctgaggtgggaggataacctgagcccagggaggtcaaggcttcggtgaggcatgattgtgccactgtactccagcttaggcaacagagtgagacccagtctccaaataaataaatacacatattgcatatatcactcaaatatcattgttttgttttgtgtgttggaggaatattagtaaaacctggtttatttattgcggaatttcttataactggaatgtttatatacattgaagctatttaaattatttttagagtactttgttgataccataccatttgatttttatgaaaactttgaagagtaggtgagcaggtatccccatttcatggatgaggaaactgatttgacttagatgtcgtgacctgcccagattcacagagctcatccgttgccacgccacaacaaacaggcaaatcccttgtcccctaggccagcagtatgcttatcaagagttgggattatttccaaaaaggtataatcatcttaaacttctccatgaaaaagtcacttaccacttaagaagatagtcacatcaaaatgtttgttttgataagtatggattgacttactacattggtctaagaagtaagctcaatggtcttaaaagaggcagaggtgttagtgtgctaaaaggcaactcatctctctgaacactgttgtgggaaataagtttttttaatgagtcctgttctgaaagtgatgagtacagataatttatggttttcaaggtaagccattttctacacctgccctcagattacacagatagaatgaaccattgggccaagaagaacagaaacttgagtatgaagaatgggaagtaagaagaagtttctaatcactctcgcatcaggaaatgtcctcccggaaaatgagtatgtagttaactttgacctcggtgcagaccataaagacagatgggagagaaatattggactctggtccctaaaatcaatgaatactatcccagggatggcactaatgagctgggggtcaggtggttgtttgtaggggaaggtaaagccgagctcttggctcctgctggtaaaggaaaaggtgattgaatgatggggtgatagagggctcattcttcagtgtaatcttaattacattacaaaatgctgttcatcagcattttgtggacaaggagaaaaaagctcagtcaactgctggttgactctttaatcttggcttgtccttcagcaccacgggcaatctcaagcaagacctgtgttctctgactgagcatgcctccctcgtaaaaaaattccttttgcataatccaattgagcaacgcttgtagtcggcactttaagaagaatcagtattttaaatatttgccaaatgagctcaaaagattataataacaataattatagcttccatttactgactacgtactaggtgccaagcattgtgtttaacaagcaccatttcaattactcagggggaaaaaccctagggtacaaataccattattacctccattttgcagatgaggaaattgaggcttagagatgtggaatgagttgcccgaggttacaaagctcataactggcaaaaccagaatgcaaatccagaactgtctgactccaaaaatgaatttctgtattcttaaatttcgtatgagttatccactgctgcttaacaaagtattcaaaaatttagccacttaaaacaacaaacgttattatatctcatggtttctgagagtcacaaatctaggagtggcttaactgggtgtttctgatgcagtctttcttgacgttgcagtcaatgtgtcaatcagggctgcagtcatctgaagactccaccagagctagaatatttgcttccaacatcactcacgtggctgttggcaagaagcgttagctcctcatcatgtgggcttctctacagggctgctgagtttcatctataaataaagataccctacagggattttaatgaggatcacctgagataacctatgagctagtgagaggtaagctgaagcaggctgcacaaattttggataatattattaatgaatttattgccatcttgcctaggatattcaggaatatggagatatccctgactcttccaaaagaatgaccaagatcatgcctaattacctccatgtcctgggaaagccccgctgtaatggagatggcatcttctccagggctctatagggtggagaagatgaagaaacctgcacacagcccccatgaagattccagtgttgtggctgggaatctctgtctccctttatgttggctacatgaaaaaagagtgtttgcttacagagacctggtggccattagaaggtgagcacccaaaccctttggtatcctagcccacatatcgagatcccaaccctggatgggaagaacaaatggcctgggtagaaaataaatccaaggctagcctaagagcagagtatgatggaaagtctttggtgtaagaaaaacccatctgtgctcatatttgctgggaggaaactggtgcccattaaggttgtgtaacctgtagaacaaaatattttgtatgtaaagcagctagaagagtgtctggcacataataggtactcagtaatagaagagtcttggtagttttgttattattgtcatcattccaacttcatatggctgtttgaggattactatatgcaattatttgtttaaaatcttatcgttcattagattgtaaattccatgagaacaggaaccttgtatagctgtcctatttactactatattcctagtgcctaacaaagagaagatactcagcaaatattacatgtatgaatatatctaaatgtagagctttgtatgtactaggtgatccatggttgataattatcagcattataatcatcaccataccattcccattaccattatcatcatcatcatcaccactaccatcatccccatcctcatggcataagaataccctggtgtgataattcaacagtgttctcagtgtatgacaatgagacttaatttcttttccacttcaggtacttctggttcacagaagaatctgggtgttttctttttttccatggtaaaaaaagacctgctccaccatattggtataatgttgttatggcttgaggaaaaaaactgtattcctaaaaaatcttaacaagccctgtaatcagattcaacgcaaatctcttggagtgatagtccactggtgttgaatcccatcttcactattttctttgtggccttggaagagttaccaaacctgtctggatcttcatggcctcatttctaaaaggacaaaagtaaaaactaaccaaaatactgataaggctattgtaaagaaataacagatgctttttgtctaatctcttgcatgtgtcctttccatggtagatgttcaaaaatatttatagaatgaatgtgttgactagatgaatgatataatttatgtctatagcttcactactcattccaacagctgagtcagcacaaggagatagcctttgaaattctagggaactctgaagggttggaagatgtaagttccaggactcgctgtgactttgggcaagtcctgagatatgattcagggtctcaagggtcttatccacataataggaggaaattccgtttgcacaacaatgagaatgcacttactgccactaaactgtatgcttaaaaatgattacaatgataaattttaattgattttatcacaaaggaaaattctggctactagagtactagctttctggatactaagacttgagaccaaaaatattggctagcatgtataatcccttacttatgccaaacactggtaaaatgtcagatgcatgatctcacgtaaccctctcagtggtcctgtgagtgagatattattactacccccattttatagatgaggaaacagaagcttaatgaagtatttctagagctggagtttaaagccatgtgtgtctctttagagagctcttgtgctttcctacttaatattctgaagttctttttgtttgtttgtttgttttgttttgtttttgacaaataaccaaatcacaaatgtaggcagctcaaatcttggtcacatgagctttgatagagaaggtggtatggagacctgatacagtttgagaaaggccttgtttgcttccattctttgaagctcgcagtgcattggaacagagggagaaaaggaaggaggagatggaagagaggcaacagcagaaaacagtgccaagatgcagttaccaatatatttctgaatttttttaatgtttacatttgattcttatatttgcatgattttaatgacaaaaaatactttattgggcaaagacatctgaagtcccaatcaaggtcctacaagattagaaagcctgagctaatggctttccagccttctgcctccagcttcccaccttccaattcctctcatagtaagaggccctgggtggcattgtgatataacctcagctggctcttggcattcccatagacagggcttccaggcttctcttcttacagctggggaaaggaacagcaaatccaagactctcatcatattattggtttgacaacacatagctattaggaccacaacccaggaagggttgctccttcgaatctcctcccatggacttgactgattcttaaaatagttgcagtagtcatagttataacaataacagcagctgatacatagagggctgataaatatgctctacgtaactcattagtgtatcccaacaatttggtaaggtaggtacgatcattagtcatttttttccatcttttttctctaagagacagggacacctagagtaatttatccaaggttacaaaatttttaagacatggaggtggaatgtaatcatggacaatgtcaaccatttatggagcatttacagtgagattgttgcaaggattgaatggaataattaaccatctaacccagaccctcacaccaatcctgtggacatggtatcataaccaccatcctcaacttacagatgggaaaggcaagacttaaggaagtcaaagaactggctgctattacacagttcagaggtggcagagccatggggtcagtcttgtgccaaagcacaaactatgtcccttctgccctttggtcttctcagggctgattagaaaacgagaaggtagatttccaactttttgcagcatgactttacctggtctccttaatagtgccgtgctgcgagtttctgttgtttctgttttcatccaaataaagcataagagaagttccagcctcctaaagcataacatcacatcttaagggccaaatttgatagtaaaatatattgttctattcagtctccatatcaaatttcttacagaagatggatgtcatttgtgctgccttttgtaggcacaagttgcaactgcttttcagcaatcatttcttataacagtgcagaacaattccagccagcccaggcgaggtttttttcctaattctgtaataatccattattttatatttattccatcagtttcaacagttcacaagaacatctataatcttagatccagtaatcaactgttcctgaattgccccgtcctaaatttaggcctcacacttggtaatttagctagagagtttcattggtgagtgccactctttcacggttgaggcaaagtgctactatttgggctgtatttaattcttattatttagcaagttgaactgtataccacggagtttaataatgcagggtgtaattgctctaatgctatgaaggcacatggctgctgacttcctcagtcttcactaggtctcgctggcaaatgagatgttgctgctcagtgaggcttctctgcttcaatattttaagaaaacaaatatcgttgcagtgtggcatttgtagaagaatctgttaaagggctgaagtagtcacaagccagagctactcataactgcgaatattcattaattgaggaattcctgagtgcttgacaatgtatgtcagcttatttaatctcacaacaaccatagaaggtgggtcctattactacctcatttaagaggcttaaagagattagtttatagcatatcacatagtccgtggcagagaatccctgctccaggatcaaacgtttgcaaatactattgcgttgttttcccaggactgctttcagttctttttgcagagcattaaggaaagaatgagagagacagaaagctccacacattcttatgaagaataaagaaagtcccaagtgagctgtgaatactggatgtttatttgcctgtttcccaggtggactgtcatgacactaatcaccagtcatggtggtccttgtttcttttgccccttccactcttcaaatatgatctcaacaactgagaacaaaatgaatttcactctgaagtataaagtatcttattgaagctttatctattcccactgctaagatctctttcactttgtagtaagattgacatttgattgcatgatgaaaacgactcctcctttatcaaaatgtttaagctttgagggcaccagtatacatgtttttaaaaatagacttctcatgcttgtaatcccagcactttgggaggccaaggtgggcggatcacaaggtcaagagatcgagaccatcctggtcaacatggtgaaaccccatctctactaaaaatacaaaaattagctgggcatagtggcacatgcctgtagtcccagttacttcagaggctgaggcaggagaatcacttgaacccgtgaggcagaagttgcagtgagctgagatcacgccactgcactccagcctggcgacagagcaagactccgtctaaaaaaaaaaaaagacttataataatcatatgtatttaaagaccatataaatgtatgttatttgttaatggactgagaatggcatcttaccctaaatttgaggtttgaggtttacacatctgaaacaacagagcagatttcaagaaaaatgacaatagaattgacagtttatttggattataccttctgattaccaagaagtggataaaaattctaaaatgtaacatacttacctaaacataacttggaatgcatcagccaaacaatgaacattttgagagtatttatgtaagaaaaagtggataaaaatcaattctgcttctaaaaatatttagaaatccaaaaaacttggccatagctgctaagaaattattcatttttaatgtttcattttatagaaataattaaattttattatgacttacttatctctaaaaaacaacaaaaaataatgactatatataatttgtattatttattgcttccttcaataagtatttctttttttttttttttttttgagatggagtcttactctgtcacctaggtgggagtacagtggcatgatcttgtctcacggcaacctctgtctcctgggttcaagtgattctcctacctcagcctcccaagtagctgggactatagccacctgccaccatgcctggctaatttttgtattgttcagtagagacggggtttcaccatgttggccaggcaagtcttgaactcctgacctcaagtgatccatccaccttagcctcccaaagtgaataaatattacttaaatgccacatcaggaagacagcagcaagtgagatgcagtagctgagtacattccactggggaagacaagttctaaatgcaaaaccaaatcagtatgtgtaatttcagatgatgataaatattatgacaaacataaagcaaagttaggaaatagacaatgccttcttcaaggagaaaagtagtcaaggaaggccttttagggaggtagaatccaagcagagactgacaaatgagaaagagtgttttaatctttttcatgtagtcttcaccaaaaaacatcgagaaaccaccagtcttatctaaaggaaaataattctcccctaatttctgccttgccatagtttttctagtttgtctttctttggaaaacaattctctaagataaaaagatctcagttcatctttcctttaacattactcccaaagtgaggccaaaccacttcatttgtcccaaaggtgagccaaacttgagcagctctactgtgggaaccagttctactcacaactagctggcaacctctgtttttgaaggctgccatttgagtggagctaccccatcctttggactcgtcagagacccctgttctcatgggaaacaacttaccatttcaaaaatctacatgattccctaacccagctgttttaccagaatgataaaagtgctatgtgggcctttcctgttctccagactgggagtgaggagttcatatgctaacctagaaataataccttgtgctgccatctggggcttcacaacctcttttcccagcctttagggaaaggaagagaaggcaaggagatgccattggatgggattctcctaaaagccagacactatcccaagcacttgataccctttattttatataatctacctgggagctcaggaatgtcctcattttacaggtgagagaaaactgaggcccatagtgcttaaaccacttcttttaagttacccagttcataagaggtagacctgagattttatcccatttcaggttccaaaactatcttctttctactacagaggtccgggaagatgtcaattactcttgaattccaaataatatatggaactctccactgctcagcatatccaaaaacctacctaattgtcatggtcagtgccttgcatgtgggacatcaaagccacaaattaaagtctcagccaaagaaagttacagtttctagaaatataatttccaataggagaagatatttcaggcagtaaactgactgccttaactgtgggtgccaaaaccctttgggggatttatcgagaagttgaaataagaaacaagacaaatacattgagacttcactgaattcctcacagtttgggaggaagaaaaatattattctctggaaatggaaaaaaaatagattcattcctctctgctattacatgggtccagctgagcaataacgcactgtgaagccaaatgctctgatcggtttctctgagctgttattaaagtttgcaaaatattgctcagattctttctggcagagtttcaatattgtctatttaagctggaattgggctggtaccgttcatttctgttaaacctgccaaagctggtggtcccactgcacaaatctcccggcgccacagccttcatcctgcaaggctggcaacaccctgagagcctacaccctctgttggctttctgatgtgactcaggtcaagaataactgaatcaaccttcctcccctttctctttgcctccctttctcaccctcagcacaccacacacatacacacacacacgtgcacatgcacacgctggcccttcacttgcaggaggaaagaaaggagctatgcagaacagtgcatctgtctgggaaggtgttaactctgctaaagctggagactctcagcctggtgttctaataaggacatgagaactcttttcctctgctgatatagcagatgctattaccctccaacaatctcccttaccattccccaactttgccctctaccctcacttcagcccagctgaacctgttccatgtcctcaaataccccatgttctttcttgccctgggctttacttctgctgatcctctaatgggaatacatttcctctctccccttctggtaaactccagtttaccctctaggttgcaacttgggcaacatccctctgatcccccaggatgatttagatgcccctgttatgtgtttctatggggagcttaagcttatctcatctaatcacaaccttgattttaagtaaatggtctcctgaacacaactaccagctctgagactcaggaggaggcctgtcttatcctcctcatgtagaacagtggggtaaatgctataacagagggaccaaaaagatatatgaaagctccaatacactatacttttatttcttgcacagataacattacgaggcaagtgaacagataggcaggatggtctgaacttctgccatcatcaataagtggctttcaaagtcttcctaaagacttctccattcaatccagctggaaagtaaaagagtatgaaggagtgccttgcagaaggcttttttttttttagaccagtactagaagtgtgtacatcactgttgttcacaccacgttctcatggcaagaactcaatcacatggccataccaaattgcaagcgatgctggggcatgtagcatctggcaactactcctagtaacaggtatgcagaaggaggatcataaattttggtggacaggtagcctctttcctacatccttctatcctcagtgcctaacacacaatagccaaataataaatagttgctaaataaatcaataaagagttttaaaaaacttagggcataaaacatcaccttaatatactccaagctgtgatataggactgtattctcacaactgctttgaataaagaactgcaaactaccaaaggtcagacaggcagtaaaaatctcaatttccttagccacttttattgttcactagttgaatgacagtgcctggcacaatacccaggatataggttctgttcaatgaatatgggtcgaatgaatgaattattggaaatcataggttattgagattagaagtgacctgaacataaccatggttttattatgcttgccaagtgatctgtcagttcccccttcctaggaagtgcatcactcccagagttagcacctgccatcttaggtcagccctgactctaggaaactcctttcttcctttgatctaaagcctggctccctgctgtagcacagagttgaaagaaagaaattcaaatattttatcatctactctgtgccaggcattgtcctgggtgcatttatgttatttcacttattccccataacaactcagagaaggaaattactgctgtggctcagtccaccctcttccctgcctggattgctgccttattattaataaccttctaattgtgctccttgctttcactgttgccctcttataataagtctgaacctaagattatctttttaaattgtgaatcaaaagtcatcacttctctgcttaaaaccccacactggctttccattgcacttggaataaaatccaaattttttgtcgtcacccacaagcccactcgattgggttccttcctgcccctctgatttggtctcagccactctcccgctcgctcactgtgctgcaggcacaccagccttctttcctttcttgaatacctcaagtttatttgcactccagggcctttccacttgctattttctctgcctggagccctctgcccccaattctttcttgggctgattccttgttgccattcagttttcagtataaatgcatttttctcggtgaaacctctgattgtagaatgtagagtagttctccagtctcaacttgtccttctgtccctataggtcacacaaattgtgtgttctccaaaggagctcaaacctgactgcatacatcagacccaccagggaagcttccaagaaacgtcattatccaggaagcttctctagcaattctgatttcatatgtcctctggattgtttaggaatcagtagttggaatagctctcctaaatgatcctgatgtgtagccagtctagaaaaccatgagtccaatatttctgtctggttctgtctgggatagaatcccgcttcaatatctgattagctctacaccttgggcaagccatttagcctgtttaatcctcatatctaaaattgtgacaagaatagtatctatgtcacaggtttattgtgagcactggaggagaatttcaagtgaaacgcttagcatggtgcctggcccacagcaagccctcattaaacgttggctcctattatcattgttaccctcctactccttttactccctctcctccttctccttggcagcttttcagggatgtcaaggcaaccatcacaaaatacctctcttccaggccagtaaccctcagttttcttttttttaatccttttccacatggcagattcatatttcttctctcatagacagatcacatcccaggaggaggtgttgtatttctgcaccccagaactcataagggttgaagcctctgatgcaataaatgtagataattgggctccagctctgaacttcggatggcactcattactggccctggtagggcagccgtgtgtggcctctcattccggggaagtcttcttataggggaattctatgtgacagtgtctgtaatgaagggggagactggagagagagtatgggagtttgtttcctgaatgcttttcatcctgacatgcttagttgagagtcagagcccagcccacattaactcattgagttcctggagtttgttgtagattttcagcctttttcattatagtcaacaccataggagccaaaataatgaaaatagtgtttgatgaagtgggaaaagcaggtctcaatgtccatagtgaagttagaaaggagaaggagagaaggctaaacgtaaaacaaagtgcgcattagttagtaataaggtatactgtggacttgggggagcatgtaaataagtcagggagaaagaattctagacattgtacaggagatacaattttcctaagtcttctttctttttttattgctgtttatcttgcaagggcaagataaataagtttgatatttttatttatttatatatttttaaatttttattattttatttttacataagttatttgggtacaggtggtatttggttacatgagtaagttatttggtggtgatttgtgattttggcgcacccatcacccaagcagtatacactgcaccatatttgtagtcttttatccctcgcccccctcccactcttcccttcaagtccctaaagtccattgcatcattcttatgcctttgcgttctcatagcttagctcccacatatcagtgagaatatacgatgtttggttttccatttccatacttcacttagaataatagtctccagtctcattcaggtcaccgcaaatgctgttaattaattcctttttatggcagagtagtattccaccgtacatatgtaccacagtttccttatccactcattgactgatgggcatttgtatttgttccgcgatttagcaattgtgaattgtgctgctataaacatgcatatgcaagtatctttttcgaataatgactttttttcctctgggtagatacccagtagtgggattgctggatcaaatagtagttctatttttagttctttaaggaagctccacactgttttccagaatggctgtactagtttacattcccaccagcagtgtagaagtgttccctgatcactgcatccaagccaacatctactgttttttgattttttgattatggccattcttgcaagagtaaggtggtattgcattgtggttttgatttgcatttccctgatcatgagtaatgttgagcattttttcatatgtttattggccatttgtgtatcttcttttgagaattgtctattcatgtccttagcccactttttgatggaattgtttgtttttctttttcttactgacttgtttgagtttgttgtaaatcctggatattagtcctttgtcagatgtatagattgtgaagatcttctcctactctgtgggttttctgttgactctgccgactgttccttttgccatggaaaagctctttagtttaactaggtcccagctatttatctttgttttcattgcatttgcttttgggttcttggtcatgaaatccttgcccaagccaatatccacaagggtttttccatgttattttctagaatttttagcttcaggtcttaggtttaagtctttaatccatcttgagttgatttttatataaggtgagagatgaggatccagtttcattctcctacatgtggctaaccacttatctgagtaccatttgttgaaaagggtgtcctttcctcactttacatttttgtttgctttgtcaaagatcagttgcctataagcatttgggtttatttctgagttctctattctgtaccattggtctatgtgcctatttttataccagtaacataatgttttggtgacaatggccttgtagtatagtttgaaatcaggtagtgtgatgtctccagatttgttatttttgcttagtcttgctttggctatgtctaagtcttattcttagtcatgggtcacttcgctttctcttaaggttgagatctgcttttgtgtggtgaggtacatttggggaatggggaagataggatcacaggtaatcataacattttgtattagttaaatattcttcaagctctataacatgttcaatcacatccctatgagtaagaagtaaaccacataacaatattcttgtctaagcaatgaggaaagtgacttacccagtatcatattccatgttataccaggccaagtaagaaaacccatgtcatctttttttttaactctcattttaggcttctgggtacatgtgcaggtttgttacataggtacactcggtcatgagggtttgttatgtagattatttcatcatctaggtactaagcctagtactcaatagttattttttctgctcctttccctccttccaccctccaccctcaagtaagccccaatgtctgttgttcccttctttatgtccacgagttctcatcatttggctcacacttataagtgagaagatgtgatatttgtttttctgttcctgcgtcagtttgctaaggataatggcctccagctccatctatgttctcacaaaagacatgatctcattctgttttatggcagcacagtatttcatggtgtgtatgtaccacattttctttatccagcctaccattgatgggcatttaggttgattccatgtcttgctattgtgaattgtgctgcagtgaacattcacatacatgtgtctttatggcagaattatttatactcttctaggtatatacccagtaattggactgctaggttgaatagtagccctgaaagcctatgtcctctaattcctggttcagtgtccaccccatctgatgctatcaaaggtttatggaatgttctacttatacaccctctcactgttcctcagttttctacacacacacatccaaagctaccatgttcttccaagcagctctcatcctagccagatggcccctctggaagttcttgactcccccaagctgccttagtaccttctctgtgcacccatggaactttgctcctatctcagttactacacagagtttactggattctaattatttttctttacaatactacctcctcattattactttctccagggcagggctatgtatgtacttatctttgtattaccagcttcttacaaagtgcacagcatatagggaatcctccataaatgtttgctgaatagttggataaattgatggatggatggatgggtggtcagatagtcagatggacagaagttctttcagggtgagtgttaaagaaatatacgagaagccagcttgctatcaaaggaggattttcttgactttctgataaagataggatccatctgatgcttttggtttagaactaacaccataattacttatccatgttctgctagaaatttcattgctgaaatctgggttcggtatgaggcttcagtacgccacagaaagaagtatcttgtcccaggcaatagtgtaatatgagtagcatagtctccagatggtgagaattttaatcctgagttattgagtgtatgatttcttgctagcaacttagcttcctcattcctcagtgtcctcatgtgttaaatggggacaacattggtacctcgtgtacaaatggtttgtgaggattaaatgatataataaatataaaacacttagtatgcaccagcacttcggacagtgcctgacacagagtaagcgctcaatgtgcctgagtccttttgtcttcctactgtgtacatatgcatctctgtgacccagaaagtctagctgagtcagctctgtatcttgagactcagttcctgcagagcctgaggaggtgatcgaagctgctctggagactgaaccaggtgtaattcactgcatccttagccaagttacttcccatctctgagcctcaatctcattatctgtccttggagagctgctttgatgattttgtaagttcaaggtcatatgctgagtatcctcgctgcgcttggcctgtccctgcatatgaattgaactgtaagctctttgaaaagggggactgttttatcctcaccttttcacatctgatcccaacttgctctttagaaggcccttgataaagttttgctgagtttgaatcaacttccctaaatcgcttaacatgctcttttggagacttagttgaactcctgaacgctaagctccagaaaggttctggcccattaaccctattcccctgcaaacagttaggtacttaatgatcctgctgcccccagcatggtacagagctcaccccttgcagatcactcccagatcctttctaggagccagcctccaaaaaccctggcagcacaactttgctggcagcatttgggaagtgaggccacgtcctctgcaaacttaatggagtggcctttttttagtttccagacaacagcattgtattcagaggcagaaggctctcgttgggtttgtaagcttttttacacctgtgcctacatagcacagatgtataacacattcatcataaggggaataaatgaatgaatgaatggggcatagttttttggtagtaccaacctcaagatgtgtagcatttaatacaggaagaagtctagggagaactacttttactattttctaataaaaaatgtcttatcccctgagtgattttatgacctctataagcatagggcaggagaggatgcaacaaaagcttttggtcatttcaataaacactctctccaactctctgcccttttcatgaattcccagttgagaaatatctgtaataggtgagcaatgataatgtcattgaataaagattgatggaaacagatataaacccaaaacgtttttagtgccagaaatactgtttgctcaacaataagttacatcaaaggacttaaacatttcccacagaggtcagcaattctgccagtgatgtactgaaattcacacctctgccagaagcgctctgttcctggcatgaaacagaaaaagtcacatctgttaacatcaatatcccaaggaggcaattttgccttttctgattattgttcaggtgctttattctccaaaagccagcctctggaagcttcttggaacatataaaatttaaagctttgttttaaaatttataaatcccttttatttgttttattttctttttttcatttttgtaaatccttgaactaaaaatagagcctgtggctgtctgtcctatgggaatcttagaggtactcctgcttcagcaaatatcacccttattcacgtaattggccccatccttaaacaaaccatgtgaccaaaactacatctttggttttctttgtgatattaaaataatattgtcctttgtcattccagtatttgttatttgagattcatgattttggagtcaagatatttggaattagaaaataaggataataatagtaacatttgcatgccaagtggtttttctttccttacttcattgaactcctacaattcctgtgtgacctgagggtactattattttgttgtaatgagggaaaggagttactagtcaaggttagaacccagacctttccaaagcctgcaaccagtgcagtcctcagccactctcatgatccaaatccaccttacccgttcagtgtgttttaacagcacctatcaacttccaacatacaatttccttatttattgtgtgttttgtttattgtctcttccctcactagaatctgagttctatgaacacaagaattacttttttctgttctattcatggatctatcccaagatcgagaatagagcctggcatgttaattgcacatatattgcaattgttacccttacttgtttattgatggtccaatgccactctgtgtttcactggtggaaaaactgaggccaggagccacctggtgattcactaaagatgacaccatgagcaaccttgcaagaaaaacaagatctcctaactgccagcccaattctttgcctaaatctcaactctatcttgccctacttttattatgctataaaatgaataactgtttatgagttcattctcaggcacattattgcttttatattacatcaaagaacttgagatgggcaaaagatatagccctattgattgttctcagaaactcaacttttccatcccgcaaggaatccttgcttaaggctcattttgaagacaggagccagtctctaacagaagactgtctccaacaagtctacctccccatcagggcagggtcactgtgattattggttttagaaatcttgaaatcaatcaactgaattgttctgtttctatccaccatactcctacagaacattagaactgaccagaagtcgaaatgctaagatgtttttggctcatggttgctcagtgagtcagtgtcttctagggaaaacccagatgctacaggagatagcatgggagtgacttagtgtgactttgaatgaggcattgaatccgtgggcctaatgtataggagagaagtcttggatgaaagctgaaaaagaaagtgacaactctagaagtaagagtgtattaagataaaagggtttgtgtttggctttcagaaaagaagaaagactccagaggctgtcaagagaagatatttatttgagcataagttgtttttacatcatcagcaacagagcacacctcctaaccctcatattaatatctctcattctgcttaagctggaatatgtaactcttagtagaagacttagagacatttttctatttctgatgataagtctagtctactctactgtcatacccattctcgaggctgctggcccaaagtggagacttacctgtagttttgacaagtcagatggcccctgtgcattaaacctgtgatctggatttgacctgtcccatgctctgctgagggatgcatcacattcagtgcagtgattatgatcataactgggagtccaccaagagctctgtgcactttaaaatgcacttcctcggccgggtgccgtggctcacacttgtaatcccagcgctttgggaggctgaggtgggtggatcacttgaggtcaggagtttgaaaccagcctgtccaacatggtgaaaccccgtctctattaaaaatacaaaattagcctggcatgatggcacacacctgtaatcccagctactcgggagactgaggcagcagaatcgcttgaaccccagaggtggaggttacagtgagctgagattgaggcattgcactccaccctgggcaacaggagcaaaactccatctcaaaaagataaaaataaaaagcacttcctcacacatttttaaattttagattattataaaatcattctgaggtaattatggcagagattcttatctccactttctaaattagaaatctgacttcacagaggttcatgacactctaggtcacatagctggtaaatgacaaagcccaaatccaaggtcctctgctgctttgttctttccactatgacattctgcctcctgcccacatggatgtcctgcaggcatctataatacatatccaacaccaaatttttatcttctgctcttgaaaaaaacccagtcctcctcctcttgctttccctgctgatttaataactgcccttcccttaattacccaccctagaaacttgaggtcctcctgtcttttctcctgccacctgtcttagagccaacccaggattttcttttttagatgtcaaacaaaaacgtcttccctcttaattgctgtcactggtactgccatgattcgggccttcattaccacttatgtggcccacatgaatattcagtagtttaactcattcaccaaatcatcactgaagttcttctctgttccaggaactgtgcttggtgcgagggagactgttctgagcaaaaagcgaaacatggatcttattttcatggtgctgtggtctcaattaagtattaatcaaataatcaccccaacgaatgtaaaaacggcaactctgacaattgccgcaaggcaagccatataatcccctacctgcagaaccagtatggagcaagatttctaaaccataactatgaccgtggcacaccctctgctatgaaactttcctaaatgcccactgcctgcatgataaaatccaaacccattagcctggtatacctgtctcttcatgatctggctccaaacactagattaggttgcaagccactacaaccccatctctctcccacccctcactcaattaactcatcctatgactaagccatagctgatccttttatttatttatttattttttacttcttgccattccagaaacagatctgttctttcattcttccacatcttggcttaaacaaaactcacgtccagaaatgcagtccctctagcaatacaaggaaatagcctactcacgcttcaggctgagctgaaatgacccctcccactcactctctggatgtgattaattattcctcacggtttccaacacgttttccacactactaacgtagcacttctcccactgtaatctgattacttactttttcctttcatcccacccccatccctcagattttgaaccacttttggggagagatcgttttaattaatagaggtttgaatttctatttattttattgcatagagccagaccgtaaatactaatagacgagacaaaaatattttgatcccttatttcttttcactatgaatatctaatttctcataggcactcctttcatcctaatttaacttcaagaagttttccccgtagttattttttttttagaaatcatacgcaaataattccagaggccttcatatcttcgtattccaccacacgtcttctcatctcaatggacaatatgtcccccacccctcctgccttttagatctctcaggcagttggcacaaggacaggttttgcctatttgcataatcactggttcaatgattacaaagtgaccatatcaaaatatggaaaatgtgttctttgggaaggccttgatgtgtttgttttttatttttgtttttgtttttaatgtttgtaaagcatcaggaattaatgaagaaactgtcaagtctgtttccgttgctgttccaagcttggccaagtctagatcttgtttctctgctaaagtggcttgaatcatgatttttagcaactgactcctagggtttgtaacaagaaattgagaaacacatgagaataatgagaacagctttttgagaaactgattttataacatgataggaatgatagaagaaaaatgtagtgattaactaaattcttgggaaggaggtaaggtgttacttaaaatgtacgtttctttaaagggcctatagattcctaggatctggcaactgaaatgatcatttcttagagactgtcacatttcctattctaaaacctaacagtcacagaagtcataaaatacagaatcatggccagattatttatgtcgatttaaatagtggatagatatatctttgtaaagtggaaaataaaatttaaaaaataacccagcagaattgctgtagagaacactattcaccacgtccattcctgaatagcacgacgatggaactgtacacaccaaaaggttcactcacactgttgtgtgccgagagatactgattctctcagtcctagacacagaactcccaggttggtcccaccattcaagaacagcctcaaccatttatccagaactccaggcaagcattaccattttcagtgtaagccatagctttaacaagagtaatacgtacttgaatgttcataataaggatatcattcaggtaaacagtggaaactcagggataaattctgtttcatccattactgtgtaatgaactacctcaaaaacttagtggcttaacataacaactgttttattatatctcacaatgttgagagttgcacgttggggcagagctcagctgagcaactctccagcttcacatggcattgcctgtggctcctatgtgatattaagctggtgtcaggactggtccaagacaactttactcaccttcctggtgccttggcagggatggctgcaagacctggctcagctggcctctccctatctccatatattgtcaggatgtctccatgtggtctctccagaagggtagtagagcttctcaacagatcaaatgcaagctgacaattctctgacaggccaggcccagaactggcatagcatcattccatcattctcctggtcaaagcagtcagaggccaacctccactcaaagggagggataatagacccccatctctcactgggaggtgatatgaaagaatttgtagctacctttaatccacccaagggtgttcgtaaaattacctcatatgttcaatttaggatttgtactttagatttataacctagatggaataggtcatttgttcattctgttatttaaaaggtatttatcaagcatttgataattgttgatatagctctgtgctgtctactgagataaaccaggaaaacacacagggcatagtctctctcctctaggaatttgcgtctagatgtgaacagaaggcaaaccacacagcaagcaattcgagtatataataaaatagctaaaatggcaaaatgcacgtcatagacgtgtatgggcaacacagatgcctacaaggttcaggcaaacgtaaaaaaagagtgaggtgaggtgagctggcctgtgaacagtagaaaggatgttgggggcagcggagacccagacagttcatgccacatctaaaggggcagctttgctcagctccagcctattgttgctttagagagtgtgagacaatgatgttacaactgccaatttttcagagaactataaatctcccaattattaaatgttggtaattattcaaatttggcctactgaccactagttttcagcccctaaaatagacggtaagtgctttaggattcatggaaagaggagatgaaggtcaactagatgaacactattcaaagtgtgggctgacaagatatggaatcaagctaagtgtctaccaatggaaaaattgattttaaaaaaatgtggtatatatacacaatgggatactattgagccataaaaaaggagacactgtcatttgcaataacatagatgaacctggagtatgttatgctaagtgaaataagcccagcatcgaaagacaaataccacacgttcttgcttataagtggaatctaaaaatgttgaactcatagcagagagtagaatggtggttgctaggggctggggatggcaggggtgggggtggggagatgttggtcaaaggatataaagttaggaggaataagtttttgaaatctgttgcacagcatggtgattatagttaataatagatggttgcatatccaaaatgtataaaagaatagattttaaatgttctcagcacaaaaagcaaatgtgtaaggtgatggatatgttaattagcttgatttactcatctcacaattatatatatatcaaaatattacattgcattcccataaatatatacaattatttgtcaattaaaaataaaaatggaaaataatagtaaagtgtgatctgagtaccagtaccatgctgtgaattgtttattactgatccacaacgggatagataaataacttgataataagagtttaagccctcatagcaatttaatatccaaggctgtaatcagtatacttgtcttcttgagtacagaccaacttgggtgttgcagaacttgggctgtgagctatacttggtgtgagctgcatgctagtcaggtgcagtaggaccacatgtgaccaagcactggaatagagaggcccatggtgaggcaccatggagaatttggacctcaaataacaggcaggattgggattagcacagaggacagaaagcttttctaagtattaggaacagcacatccagaaatcagagtcaataaggcactaagaaaaatcgggagagctgatttgtgaagggcattatggagggtgcagatggttggataaagattatggagagccttggacatagccttgtacaattgaatttatcctttaagaaatgtggagccacaggaggtttttgaatacagatgggcatcactaactttctaaaataccctttctcctttttttctcctctctttcaaggcctgattcaaattccaccctctccaggactagtccatgcaatagcaatcactccctttataaaatctagttaaccttttttctttttctgaatcaacaaataccttatactgttaattatttttctgtaaagatattgtcttttcttccaaatatttcaagcactttatggacaaaaactcccttacccagttctgaatcttcctcagaatctagcacaatccctcacccatactgatattcatttggtatgtgctgatgagcaagacaggttttgtagggatactgatctggtaaaagtgttttgaatagatgggagcagaaagtagaaagttagagaccaggcccgggcgcagtggctcacgcctgtaatcccagcactttgggaggccgaggcgggcagatcacaaggtcaagagatcaagaccatcctggccaacatagtgaaaccctgtctctactaaaaatacaaaaattagctgggtgtggtggtgtgcatctgtagtcccagctacttgggaggctgaggcagaagaatcgcttgaacccaggaggcagaagttgcagtgagccgagatcgcaccactgcactccagcctggtgacagagcgagactccgtctcaaaaaaaaaggtagagaccagatgaagacaccacaagggcctaaacgatgaatgcggagaggaaaaactgatatagagggtggatatagggaatgaatattttcagaaacatgttatgcacacaaagtcacattagcagtttcctgaaatctcacaccacattcatacgcagctaatattttcattgtcaagaaatgttgagaataagctttattacttaagagttttccagattgctgaaacttactgttttaagcacctagatttccaaaatctatcattatgcacatcagttatttattatgctatgatactcatatccctaccctaaatagccctggactgctgtaatgttgtattttttctgtttcttcacttctctaccaactactagtaattgatattatctgtaggtcttggctacttctatgctgctacttacttcacagaacttgttctgagtaaagattaaaatatagatctctggagtagaaagcactcaatgactgcaccaaaagcaatggcaagaaaagacaaaattgacaaatgggatctaattaaactaaagagcttctgcacagcaaaagaaactaccatcagagtgaacaggcaacctacaaaatgggagaaaattttcgcaacctactcatctgacaaagggctaatatccagaatctacaatgaactcaaacaaatttacaagaaaaaaacaaccccatcaaaaagtgggcgaaggacatgaacagacacttctcaaaagaagacatttatacagccaaaaaacacatgaaaaaatgctcatcatcactggccatcagagaaatgcaaatcaaaaccacaatgagataccatctcacaccagttagaatggcaatcattaaaaagtcaggaaacaacaggtgctggagaggatgtggagaaataggaacacttttacactgctggtgggactgtaaactagttcaaccattgtggaagtcagtgtggtgattcctcagggatctagaactagaaataccatttgacccagccatcccattactgggtatatacccaaaggactataaatcatgctgctataaagacacatgcacacatatgtttattgcggcattattcacaatagcaaagacttggaaccaagccaaatgtccaacaatgatagactggattaagaaaatgtggcacatatacaccatggaatactatgcagccataaaaagtaatgagttcatgtcctttgtagggacatggatgaaattggaaatcatcattctcagtaaactatcacaagaacaaaaaaccaaacactgcatattctcactcataggtgggaattgaacaatgagatcacgtggacacaggaaggggaatatcacactctggggactgtggtggggtggggggagaggggagggatagcattgggagatatacataatgctagatgacgagttagtgggtccagcgcaccaccatggcacatgtatacatatgtaactaacctgcacaatgtgcacatgtaccctaaaacttaaagtgtaataaaaaaaaaaagcactcaatgacaactatttttcttgcaatgtataataaaattctcaaagctttttcactaacatttagatttatttttgatattacatttattttataggggttggcaaacttttttgtaaataaccagatggtaaatattttggagtttgtgagttatatgatctctataactatgcagctcttctgttgttttgaaagcagctataagacaatacgtaaacaaatgggtgtggctgtgatccaataaaactttattttcagaaacaggagtgggctggatttgtcctacaggggctatagtttgccaatacttgttttagattattaaaattgccagagcctaacatttcaaatagagggatttgtccttaacttgatttataaagaaaataatatattttttcatgtctatattcctctagcttaaatattcttattcagatttttaaatagtgctgcaagtaaattctcctaacgtgtaacaactgcagtagcagcttagcccccttgtttaaccttcggtctgaggattggtcctatctaacctctgccttcacctccagccattgtgccactgcactttattctcctttctagtttattacatccatgcgctctaaggcaccctctcctaagccactgatttctgtaggaaacaagagctttgtcatcagccagcaagtcctgggaaagaattacaatttcatgagtattatagctttaaagcaaagataaacaacagttatttgtattgaattcaacactaagttaacttaaatgactttcccctaccttctgatttccaaattaaattaaacactaagtttctaacatctatacccacagtaaatagcatcttgcatacatgcctgtgaaaatgcttcctgcttcagtgatatttggaattttcttgagacaaagaagatatagatatatttccttaagcctctttagctgaacatcacactacaagatgaaaagcttgacagtgttgcctcttttggtgtagatgacactaccaagggcacacactatgaccatcagctaacatgctgcagaaaccataacctgggcatgcaggctgctgcatgttgaaacaaaaggtcttgacatcctgacatagaaggtgaacaacagtgtgaaatacacttggtgtctgtctaaagtgacattgtagttaaccagatttctgcctccatatggaaccttcctgtcagaagaaaaggactgattctagtccctgtattttattctatcgacacgatattctgtttcttcttcggatgccattctgaataacctatgactgagatcaatcaatccacagtgattcatgcttgtttccactatgatattatttcttgggaccaccaacagataatctaaaaaagcttgacagtatcacaagtatatttgcatcaaactcatgaactctactctcaatttccaagtagggtacaagaccttgtgtgtttatgggaagttggggtgtggtcaataggtgggtgtgctgtgctgaaactttttttctcttgaatgtttttttaattctgtagctttcctgaaccgaccagaattgacctagacttcatctcatgatatagtcctatgagggctaaggaataagactttaggagctccataagccttgcttagcccttaataacttcagtgtgtagaataatcatgcaagagtttcagttcaggagtcagcagatctaggctgtcttccaggttctgctctttgggattctagaacaagtcttgctcagagcatctgtgaaaattaacagggtagtgaattttgatgatctgctgcatggcaagccaccccatactggagaggctcaaaacaacaattattatttgctcatgattttgcaatttgggcaaggcttagcagggacctcttattttttccatacatactatcattggggactgaggatccacatccaagatgtttcactgaaatggctagcatgttagcacaggcagttggctgcttgttcagctgcggtggctgctgatatttggaataacctcagttgccctccatgtgggcctgtccatgttgcgtcatggcttattcacagcatggcgactaggttcaaaggaggaagaaacagaagtttccagtcctcctaaagattaagcccagaacagacacaaagaaatttctgtcatatgctgttggtccaagaagtctcaggcctgtcccagattcaaggaagcaggagggagaaaaaagaccccatctctcaatgagaggtagggagaaaggctatgacaaaatatttgcagccatctgacataggatatggagatcattcatggtttttatttcctgtaatataaattttaccctacaagattcagatttaaattcagtattttatctctttgccaaaagatgaggtccagcctccctccacccttttatgcttcatcgtattctcattctttattaaaaaggcagggatttgaggtttgttaggtatctacaggatacaagatccatgatatatgctctttcatttaccgtatttcattgcatctgagatccaacttgtctcatattttaacatttctgaattgtaccttttacaatctaggaagtcttgtaatcactgtaggtcacatggcagtgatgcacgtctgaagtggcctgtgattgtgcatatcttcattacttcactcaaattcacctgttgagtttaatcactgttgaaaaacatcttcagaaatattatactataatttggcattgaaggaaaaatgtgtcttgtatgccaaaagtcaaagaaacagtgccattagtgaggcaaatgtttgacattggaggtataattacaacttcatatatttttgcaaagcagcaaactgagctttgcactacctcaaatagaaagttattacaagtagatgaaggtgtgtttcgttttattatggagatacatccaaaatgtttacttatcacacatgaagtttataccagaaggcatagaaattgtcaagttctttagagcagattaaagaaatctttaagccacaaaaggctaataattatgcctgatgcgggactataaaaagcattatatcatagtttaatcagcatcttttttttctttctcagtggtacattttttttaaatgtactttgggtcagacatggtggcacacacctgtagtcccagccacttgggaggctgaggcaggaagatcacttgagcccaggagtttgggactacagtgcactatgatcttgcctacaaagggccactacactccattctgggccacatagtgagacccccatctctaaagctttttgaaaaaaatgtatcttggatttaatgaaatatagtagttcacacaaacacacacacacacacacacaaaatctgcaacacacacacaaatcttctccttttacacatgaggaagctgtggttcagatggctcatagaacttaaacaacttgaccagtctcaaagctgccaaatggaagaatttgttatcttccttatcccacactggttccttaaaatggtagggcaacacaggttggtggttctggaaagatatgaatattgtgtagtgacagccattccacctcctgtctccagcaaacttcaaaaatatgaatgaagtgctgttgtagtcccccgaaaccaaacactaaccgtctggagggaaagcttttcatggggctgggccactgcccaggactccctcgcaatcctgttcagaagaatagaaaattaagaaaaaaaaaagcttacttgtagagttttataagggcctcataattttatagattcagaattacttctctgaaatgggaataatttaaaataagaaatattttccaactcttcagaacagaagtaggtttaaggaagacttgcccaaactgttattttaaagcaggacattaaacattccttggcccttgcaaaagaaagctgtcgtttaggtcattgctactcactcaccctaaggaaatgccaggagcttcctccctctctctctgtctgggccagctccattggagggccactgtggacagcagcaagggcctgctttcctcttctttatttccactgcaaagaggagaggagaggcttgtagactgcccctaccataatgagtgagactccatcgcttctaatacagtccttcattatttatcttacgtttgtttagtttaggagactatgctgatgatttgggagttgtgcaaagatgcttaaacacaatcccttcccacgtgaagtttccgtaactagatggggggataaggcttgggcagaattcccagccatatctgtaaacagcaaggagagctcctccccctcccttctgctcccctggaatcttgcccttctataatagcatgcaggacatcgtgcagtagtggtttttctgtgtgcgaatctctcattagactgggagctttctgaaggcaagggcaggggttatttgttgttcatttttatatccctgatgtttagcacagtgcctaggacagcaatcaagagatgatggttattccatttgttcatccattcattcaacaaaatcatgtggaggttcagagcagggagagataggctttgagagaatatgtgaggccttctttcagaagtagccagtgccagtagcacttgctcttacagaaagggtagaatttgggcagaaggatgaagaaagaagtagagaccatgtaaacaagggtagggccgtgtaagacaaatttaatccatttctgtgtctggaatgcattgtggataaggatggaaggagaagttgaggttgccatcatgaatggcctggaatattaggtcaagttgttttcttgtttttttcttttcaaatgagacaacaataaatagaatccctctccaagctgcactgctctggaggacagcagggaaaaatggtataggtagcttctcattagtaaatgtatctgggatttgtcttcctcctcgcaaatgatgtacaaagaatactgctttaacaataacagattccaggtcttggctgtgatgcagactacacttccttagggaggtggaagtgcatataactaagagccagagcaggtttcatcctggcttcatcagttcttagtggtgtgacccaacctctttgtgctctagttctcccatttcaaagcggaactgataatcatatcaacttcaaagctgttacgaggcttaaaagtaataatgcacgtaaaccccagggaacagtacttcttggcacatgagggtttcacaaatgttagctattattatcccttgtcttctgtgtaccttggtttcctcatccaaatagagataataccatcccagcccatttctcctggaccctgacagaataaaatgcaattaaatgtgtgaaagcaatctggaagttaagtgctgcatagcagcaaggtggtggtaggactgttaattaccatatccttggctaagaggtttggtaattaccatatccttggctgagaggtgatcccaggaggttgggctgaaaggtaggggggtcttggctctctgggctctccagggtattggccacaggtgtgtgtttgtgaatagcttctctagatacagtatgtcaaggtaaaggccttatttgactggtccaagattacataaagatgggaataaggaaatcaactaagcaagaaataaataaggtttaagccccacagctttgcaagcagtgtaatttcaaacatcgtagtcttggacatctgggctctattacctaaaatctcattaaaccttcagcttcataattctgtgtagaacctggtaaattgcaagatcctgctgatggccaccagccagttcaagcaattaatcacaagggtccccaagcaggtttgagactcatgccaagtggattctttaaggggaaagtgcgtacacaaaagaaatagcccagtccacacagttttatagcaacgtgctttgaggctctgcccacacagagaaattatctgttatcattaagacatctcataactctttcctcaatggaaattagtacccaccagcccagggaagatctccaaacctcgttaactgcaatatagattgtaacctgctgagagctgaaggctgtagttcagacaaaaccaagccctaccctttcaccaccctcagcagtttctcattttggggaactcgacttgagctcttttttcttttaaacttttctggaatgtctggacattccagaaatgtttgcatttccctctgtgttccagaccaaagggcaagaacccacaatataataaccttggagactgtcttcagaatcctgccctggtatgacccaaggggaaagagctcataacaaaggaactatttctcataagatttcttgcttgattttgccaattcaaagaggtttatgtaaacaagataatcatccgcacttcagaatgtttatgaagccttttctaattactattttgtatatagagtgattctgggaacatgatggagaacagaggagaagccttgagccctccctacatacagcaggaaggagagtgagaacaagagtacacttacaatatgggtgaaaggatttgaagcttcaccttgctgtttaggtttcttctctctaaactttatttttttattaaattgctgtctctcttttctccactacagagtggcgctgtcaaatatggtagccaccaggcatacataaccatataaagataaatgaattggaattaaataaaatttaaaagtaatttcctccatgcaccagctacatttcaagtgctcagtagccacatgtggctaatggctgccatgttagaccagatctagaacatttccatcattgcacatagttcagttcacataggctttgagagaatatgtgaggccttctttcaggagtagccagtgccagtagcacttactcctcctccttcctactcaaagtatggtccacacaccagcagcactggtatcacctgacaacttgtagaactatgtgatctgcattttaacaagatacccaggtgatgcatacacacatcttaaaatttgagaagcactgtttaaagataccttctactctaagattccgtatgacaaaatgtcatcactgttgtaaggattattcattaatacttttttatttttattttattttattttatttttgagacagagtttcgctcttgttgcccaggctggagtgcaatggcacaatctcggctcaccacaacctctgcctcctgagttcaagtgagtctcctgcctcagcctcccgagtagctgggattacaggcatgcactaccacacccagctaattttgtgtttttagtagagacggggtttctccatgttgatcagactggtctcgaactcccgacctcaggtgatccacccgcctcagcctcccgaagtgtcattaatacatttttatcttgcatagctttgtttccaaaagagatatttctatctccttgagaggtgacaaaaaaaaaaaggagtatttacgtagaccttgtattctcctttaaaagtgtgcttttctttttctcttggaaaagctgcaggatctggagatttttaaaaatattttatctaaagtagtgaatcttagagaacattgttccaatgcagaatctgttggatcagtcaacagagaagcccttgaaattaaaataagtttaaagcaaaaggcaaagaggagaaaagataatttaaaaaaagaagaagaagaagaaaggaacttcacttattcatacagttgacaaacacacaaggctctgtgctctgtgactaagagagatggggtgtagaagcaatgagagaaattagaaaacagtccctcggagtataatctgccacccagtctaacattgtggagacggagggaaatttcaatggtatcttagattatacttcaaggtacatttttatgctgttttgtgccagtggacagagttgtcctctggaaggttcaatgggcttttagctggctgtcagaatgtaatggcttgagatacttgcctctgtccagtgcaaaaaaaaaatggaatcactgaggttaccagtgactaattggctgtacaaatgcatccctgctgagagcatctggcctgatgatgcttctcccagaaatgcatcatcctgtattcatgtggtacaagatgatagtccactgttgtcaccaggcttctagctcaagagagctgtaaagctgggtgaggctttgccatctttctagggaaacattccccagagactggagttaatagatatcctaaatgatcacacagaatatatagagtttcagatacttgcatatactgaaatttctaaaccaattctcattagagaacaatatcctggcctcccaggaaattctgcccatacttgaaaactgctgatttcattcatgtggctttcttcatacatacattcattgattcactcactcatttgacaaacatttcaggagcacctttgatagtcccgacattctaccacacacaacagaaagagaagaatgagacatacttcttgcctgaaggaacttaaggttcacagcagtagtgcttacagagaggtcctcagactagcaatatcagtgtccctgcaacattattatgaattcaaagtcacagggctatcccagatctactgaatcagattatttccatttggtgcccagaaaacagcattttaccaagctctctggggcatttctaagcagagtaaagtttgagaaacactcatctagagacagcgcatcagtgattctaatagattgtgatacagattctatgtaacaatatgtgtaattatacagattggagactcttcaacccctgaagcccccaaggcaatgcaggatactttagtgtttaatacaatacatgttgtttgattgatgtatgagaaacctgtaaacaatcctggaatgatggaccatgcctgtattcccaggactttgactgggttgaatagcttctcctgtctgcctcactctaaatatttggatcactgcactgtattatatccaggatttgtggcattttattatgtgaaaagaacaaggctataaagcaaattttcctgccgtatataccacttttctctgtctgaaggacaaataactactatttaagtactgggggaaagatgtaggtgtgttcatggattttgccaagctgcttttgtgtgaattctcaaggctatgattaaacagagttttctagtcctcccctggacattctgaatcattggaaatggagacaagctggacaaaagaaaaatgttaagaagctccctcagatgagtttgaggcagtcaagtttgagaatctctcatcaaaatgtcagggttcttaaacctcggaatctagagattcaatttaacctccaggaatcagagtcagtttctgagaggtttttcaggctcacagtgtagtagactagtggccttacttttagaacagtaagtgagcaaatacaatgtccttttttttccccaagggctgaggaaaaggagagagacagtttgcacacaagggcattctttttctctcacgttctcaatgtgtgtgttggttgggaccttcacttgtcacgagaacccttcaaaactccccagagaaaggtgaccatccaagcaacgaggactgcaaagccaggcagcagaactactcctctgacagtatcaggagccagttacattttaatagaaacaataacaccaaggggtgagagggtgggggtggaggccaaggccttcctatcccatctaggtattcgtctaaaaatgttgccatggggccttgagaccttgtatttctcgcttaacatttctggaattaacaggcccctgatatttcatagtcagatcaaagatcatagcctagcctaaaggccacagcctgtcttccatcactcacccctccaagtctggctttctgcatttgtggagtaaaggtcatggtacctacctactttggttgctgcaaagtgaacacaggttcttagcctgatgctaagcacctaggaagtacttggtgaatgatagtgctaactcttatggtcattgtgttatctgtagactctgctcctcaaggttcttcataaaaacagaactaataagatgcataaatatgtatagagagatgtattataaggaattggcttattcaattgtgaaggtagagaagtcccaagatttgcaaactggagatccaggagagccaacggtatggttccagtctgaatttgagtccaaaggcaggagatggcagtcaggcagaaagagtgaattatcccttacccagcctattctctttaggccttcgatggattgaatggggtccacttgtattagggagggctatctgctttacaaagtctaccaattcagttgttcatcttatctacaaatacctttatagacaaacccagaataatgtttaaccaaatatctggacacccagtggcccaatcaagttcacacataaaattaaccatcacagacttattgtgctttccagtttactaacgataatgggaagttaccagttagtatgtatgcatctctgttttattacacttaacccaagttctctgtcatcctgataccaatctcgttggagattcttttattatatttttttctttttttctttttttgagacagagtctcgctctgtcgcctaggctggagtgcagtgacgcaatctcggctcattgcaagccccgcctcccaggttcacaccattcttctgcctcagcctcctgcatagctgggaccacaggtgccggccgccacgcctggctaattttttgtatttttagtggagatggggtttcaccatgttagccaggatggtgtcgatcttctgacctcgtgatctgcccggctcggcctcccaaagtgctgggattacaggcatgagccaccatgtccggcctctttggagattctgaccttcatcttcatgcggtcagagggttgattccttaatcatactctcagtgggcaactccccctcccgatcccgcttctcttcgtcaaattcttgtggggcagagagtggcagacatgggaccagcgctgctgagaatacatatgatttctcccatcatagactagaagcaaagtttagctttatggccacataaatcctttgtccttcttttatcttttacctctcccatacatattaattaattaattaattaagcatacctctctaaatcatccaatcttgattcttataatggtaatgcctgtgagggttctaaaagttagaaatgatttaatattagaggttttgattgcattgaatataaaatcacataaaatgagcaaatgatgagaagaagaggggagtgaggtttgaaattagccttatttcctgtacatacacgaggcacacttatgttggtttttatcttggcctattttgggagtgatatatttggctcacaaccaggagtagaaaatagaaacaaacaaaaaaaaaaggatgagttcatgtcctttgaagggacatggatgaagctggaaactattattctcagcaaactatcgcaaggacaaaaaaccaaacaccgcatgttctcactcataggtgggaattgaacaatgagaacacttggacacaggaaggggaacatcacacaccggggcctgtcgtggggtggggggaggggagagggatagcattaggagatatacctaatgtaaatgaagagttaataggtgcagcacaccaacatatcacatgtatacatatgtaacaagcctgcacatgtaccctagaacttaaagtataataataataaaaaaatagaattaaaaaaagaaaagaaaatagaaacaaggacctgtatcttccaaaccaacctcagtaccactgacattttgagccagataattttctgttgtgagggctgtcctatacattctaaaatgttcagcagtttaatgggtttctacccattagatgccagtagtacctgcctctccctcgacacacacacacacacacacacaagttgttaccaccagtgtctccagacattgccatttgtgctgtagggggcaaaattatatccagttgagaaccagtgctctaaacataggaaagatcttagactgttaaaataaaaatgtgctgcctttctctaggtcaaacctcttatttatggcactccatgtataggattcatgtttgatgagaattcttttatgcaaacacagttacttgatttctctcctccattcttgttggagaatttcttttcccaacaaatgtttcttattgagtcaggaaagcaccgtggtgagaacagatctgggttctagtcccagctctatgcattctagcactgtggctgtgccagctaacgaccctgctgtcattttctctgtgtgaattacaggaataatgaatccaaacctcaaaaatggcagtacagattcaatgagtaactgcctataaaacctttgtaggcatattgtaatcgttccataaatgtgagctctgcttattggctattctgctggggcaaccatggatctcacttttttggaatgtgcatttcacaccagatataaattgtcccacattgaagttgcagttcagatacacccccaaaggccttgaactcattacacgaaagacactttcaggtagaagatatggacccttctttctgaagggaagacactgaacagcccttttaaaggatgaagtcttatttcccccttgagcccatgagacgtggggctgcctggatataatatcttttcttcttctccacacacaacaatccttcagccctgtgtgctggagttaggaaaggtggggcgggacataatccatcccagatctgttattgaaccttttgccaagctggccactgcctcctgggccagtcacttcctgcctttgaagtgtttcagactccctttctcatggaactgtctgttaagggctgcgctaatctgggagagagcaggagccagagtgtgcccaaagtggccttggcaagcaggaagacagttatctgcctcctgggagttgcaaaggcttgacctctgggtattttgtttcttttcctggcccccagctatagcattagaacattgacatttagcattaaaacactgatacttagcgttagagctttgactttgatttctccaaggaattttaggaattcatgataataataataaaacaatagtagctatcacttagttatttactaaacaccacgcaaaatgcttttcctatgagtcctttttaacaacacagcagcctggtgaggcaggaattatgactgctattttaaaggtgaagaaaatgagcttgggaaaaattcatgtgttcaacatcacatagctaggaagtagtgagcctaggatgtgaacccatatctgccagagcccatgctcctgaccactagactccagtgcttccctcctcatcccagactctgaagccatagggctaaatatgatgattgattccaagaattcttgattccaataattccaagaatgtctaaactattaatagtaatgatggcccatcaaacagaggtttgaaaaagagccttttactatttgttagctgcaaaatccatacatggacagcccccaggatgtacatcttccttgagtaagtagttgataaagcagagaaagaaaccagagcaatcccactctccacatgcagaccaggattgaatctcatgcaacattagttactgaattaaacagagaaacaaagattctcctccaacatcattcctttctttattaactttacaactatttaataagcactttctgtatacctgacactgcacattgcattaggagaatacacaacaataagacatggcatcacccacaaaaaaattaggaggaacgatggatacattaaattgaagtgttcattgtgggttttttggtaaaaatttgagatgccacactcgcacacaggagagagttgttagctgtgtctagaaggaaagaatacttcataaaggaagtgacgctctaggtggttgtgaaagagggcggggttggtgttcactaatgctagagggtatataaagaagacaccctgggaaaaagaaaggatcagcaagacctggaacaaccccacacatatgcagagccagaaggaggctgggatggctgaagcacaggggatggagcccaaagagcgttgtatatcaaagaccacatatttcccccttttcagagccagggctgtctaatgcaaactgccattttgcattttgacctcatgtagatttatatacccgaagacatgattcctgttgcagataagtctctagcaaagtgatgatggcagaacccatcactatacagatgtgattgatagaaagattaaggttcaagggtccaggtgtgtgtagctgggtgtagtggtgcacgccacgcctgtggtcccagcaaggctgagaagtgaggggatcacttgagcctgggaggtcgaggctacaatgagccgtgatggtgccactgcaccccagcctgatcgatgagagctagaccctgtctccaaaaaataataataggaagaagaaagactaaggttcaaggcctactttcaccacgtgtcttacacatacagcctgagtaaatggggacctcttgtcctcccataaagcccatctcagcatggtgacccattcaaaaggaacacaatactaactgcaaaaacagcaaagagcagtgaagcatcactgactaccatggaaagatttcaaagatgacactcctctgccatagcacactcttttctttggccatcacttttcccaatgccccactcattatggccaccactgtcccaaacctcctatgtcaccctctaaaccttcaacttgtctctctgtggcttctagttctatttatattcatgtcttgcaggagtatcttgttgctctaatataaattcattttagcctctgattttttttttttttttttttggtactctaatagggcccttcatcgtgctgattgggcttgtggataaacacggaagcctactcagaagatgggatgggaaaggctcagaatatttctatgttcctccctatcactcctgtatgtcactagagggggacacacctaagtctggtgtatttgtttgttgtcgttctgctgttaaagacataccagactgggtaaattataaaggaaaagaggtttaattgactcacagttccacgtggctggggaggcctcacaatcatagcagaaggtgaaagtcacatcttacatgggagcaggcaagagagaatgggagccaaggaaaaggggaaacttgttataaaaccatcagatctcatgagacttattcattactacgagaacaatatgggggaaactgcccccatggttcaattatctcccaccgggttctccccacaatgcgtgggaattatgggagctgcagttcaagataagatttgggtggggacacagccaaaccatatcatttggatatagctttgatccttactagctgtgtgatcttgggttaataatacttctgggcttcaatttcctaatctataaaatgggaataattctacatgtcctgagaagaggattgggcaatgataagggaaagtgctctaaagtatactgcactccacttacatccatggttataagtgcttttttaatatcctaagattagacatatctgctttctctcagctactagagaccattgtaggaaacatggttatttaaagaagcagtaactatgataaacctagttatcaactcatgactcaggttccaaagtataataattaattagggcttactctttattatcattattcttttttaaaattgtattttataggttattcattattttccaaggtcacacattttctggatctgattttagccaggtctcaaggatggtacactgtgtcaagttcctagaaatcaatgttgttctttcaggctgtactgccctcctagcaggtcaacctggataggatcttacgcacattggtgtttatacccctttcaaaatactgaagtgtttctcttaatgaaattacaaagtatttattttcaaggtagtattagtgagtgaaaacaatcatgatgctttagttagtcatggggcaatcctgcaaccctgtgagcctaatttttgttgttgttttgcaaaatactatgatgacagtaataaaaattctagggccttcattttcacatacagttcttttctatgcatatatataagctttatattgtagtatatcataactgtttccatgttgctacataatcataatcatcataattagtattattttaatggccatgtaattatccatcttgttaatgtaccataatttacttaacctaaatcttcaacaataagagagtggttgcttccaatttttcctctatgataaataacctctagtttacctatttgtgcatatagcttctttcttttttttagattatttccttaggatatactcctaggaatggaattactacatttaggcatatgcattttcaataatttttgaataaattgacattatttttccagttgacaatgccatcaacaataatagtattctgctttcaatacaacctatcagaagtattattatttgatatttaatacacttacatagtaccttttattttttcattttctcaaaaatagcaaatgttaatcaaacacttgcttacaaatagtgcgttctgtcatgttttgaaaagccagttagttagatttgagagccaggtttgaaaactgaggtagatttttttttcttttgcatcaagaatacctgctgtgcttctctcccattgtctgatagttttgtgtattagaaactaatactgatatttttctgagcaaaacattccattgtactcatataataattcttgaagacccatgtataaggaactgtagggagtacccaaataaaataacgggaactttagacaatttaaattagaacactcaggaaaatacattaatatttttatactagcactcccaagcccaaaagcagggttgcaattcaattagtttaatctctggtccgattttaatgactttctctatctagtctctaaccttcccagctaatctgacttcgcaactagcaaactcaagagctccagccattccgcttccaatattttttttctagattgcatcccaagaaatctttctgataaatgaaacccccatctctctcccacaataaaatgcttcacaccatccccaatcttaccttgcaccagaccaagcaaatgcatgaaccttcataatacatgaaatggtttcccaaactgcagccccgccatagggctggatgccaattccagagatctggttttgccctcccttccaggcagcttcacctatttctcagttgggtgtcttccatgccttgccaaatggtagaaaaaaaaatttcatgaatataagccactgtaaatccatcctggcattgagtaaccattattctgactagagctttctctttggcctaagggtgttagggtttgtttgaataagataattgctacatatcagtgcctggaaacataaaggaaagaacttaccatatttccccctttttcttcttgcagcatcatctgagggttctccataaacacggttagccttccaagctgctgtcctgccagttgatatgaacatggcctgttcctcacagaaagactaacccatggcactgccagaagatatccttggatcgtggacagattaactggattaactgaaaaaagcacccattcagtcaatattatgggttttggaaaaatcttgctttgctgtggatttaaaatgaggtgcataatataatgccaactcattccaagtggtcattggcagaccattagctggaaaattgcttccagttttcatcactgtgcataactcaagttccctttggggagctgtctgtgcccttcactagaagtcctgttttagcatggcaactactggattattttattatgtgtgcagatggcatgatgttttagaaaaaaaaaattacagcaattctgcaatctcagtggaagtgttcacaatattatgccctggtaggaatgtaaacacgtctcgattatgttagttatgatgtctaaaggtatactgtccaactcttaagcactttatatgagaacactacaccaagatgaatcagcacattcagcacatgtgagaaatcaagtattttctttttatttttataaatcttagtggtttttttttttccggctcagactgtccaagacaaactccactactcgcatatccccagttgtttgtggtaggttgatgtaaatatggccacaatactgttagacttcacctccagatactttattgaacaactggtttacttctagcaccaaagggaagaagaagggggtccagtgatggtgatatcttagcttgcttctttgttcacaggcactattgaccacatgaacatacaggtactcaaatacaggaggcttctatttggctcctccaagggaggagttcctccaagggaaaaaaggggatggtattcttttaatcaaagaccatggtggatggatggtaagggcaacagaatgcaattcttttgtgtggtctgacgttaacacttcggaaaaaattctaagtcaagttgaaatcgccattctctcaagagagaaacatcaagagagaaacatcaagtgaccccactatgtgcctagagaaggaaaagggtcaagtcctatactaggttccttacttagggtagaacctactagtcccttgttaatcctttctgggattatacctgtgactaatttttttttttttaactatgtcttacgacaaagcacagtcctgggaaaccagtcaacttaattattgcttgtctttgagcattagagacatgttcatattgacttgctacataacactgtagcatgttttttcctgaaaatatcaagttggttgaatggaaagctcagcaaagtatgttctgtgtgcccactgtcccagcctgggactgacgggcatcagaggctttgctttaaaatatgggtaaccagttctggaagacttccaacgcaagcaagcttggtgttttagggtgtctccagatacataagcattgtctgcctccgctcagggtctcaggaaatacacagcccattggaaaccacccacgcctgagatttggaaacctgacggaaagggaggaaggtccaaatgagtcagcagcaggatgactcaccacaagcctggcaggctgcagagccagagaagggggcttccaacaaggaactcagagaagttgcagtcaccaccaagatctggcccttcggcaggtcagcaccaggactgccaggccctctgcagaccgtaattctcttcacatctataattaggaggccaaactccagctgccaacacccttggacacaatattccagtctccactgcccatctcatgtggttcagttctaatagcaggtcttcttcttcctttcattccttcctttattcagcaagcatttgttgagcatctactatgtgccaagcattgtgcttgggcaacaacagtccacaaagcagactccccacctgcccttatgaaactgtatctcctcctccccaacattatcaccaccccaccatttccacaatgaaaactgaattcagacagcattctccattctgccagagtaacctaggaagaagaacatggcagcagacggatcctcagggaggaggcagcagagtgacagatggtaaactgcatcaggccacatatttgcacctttcagatacagccaactcttccagggcctagactgagctggttggagctccccaaagcagcattcagttgcttttccttgatatccaccctggctacctatattccctttctttatataggcacaaccattcaccactacgctggattatctaacactccaattctataactcatccaggggacacacagttgagtctgatgaagcctaagaactgccaggtgctgagatattgtaactgggaattaagatttagccaaggacattgtgagactactgctgactctcttggaaaactggacatgctttgtagtgcaaatgttcactaaatgatggtggttcattgttacttactttggcctttgcaaaatattctgaacaattcaataagtagagtttcctagtttgtttgtttttttaagtcaaaggaacgctgtgaaattattgaaagatgatgggtgaagagggacctaggagaaggcaaaatgaagaccattaaagagccccattgaagactgtatctctaaaaatgccttaatgcctggcacatattccatatttgcatatgaactactattcttttccaaactgtcaacttctgtttgaaatcattgtgggggatagtttggaaatatggtggcataaaatccaagcagtcaagagctaaaccagcaaaaaagaggaatgacttcattcacaggctttggcttctttattatgtggtggtcctctgtgatctcccatggttaacttcaactgtgctgtactttcttcccaagatgcatgtacggaatgttacctcctagaaatccagaaatagttgtggtgagttttgtttgataggaagcaagaggtggggaagtaaaggatacatatttttatgtctaaggactgtaaactgttgatgcttgacttttccttttacctacacctgtgctacacctttattaaaaggctgacacccagacttgtgcaggaaaggcactcttgggaatgaacagaaatgaataattatgagactttccatggtgccaaggggattcgcttatttccactccagaactgaatatgcagagcattgccagtcctgctagtgtgaaaagcaaattacttcaatagtttgagacgtacctaggggaagagagatcctatcaactttctttgcgggtagtggcgtaccttcaaatccttgctcaggctctgtgaggtgtgcacccgcagatttcacttctacctccggaatcctggcaaacaagccaggaatctctccagagtcacttcgcagttgctcagaaagaggctaacggtccttagtcctgaggaaattctgccatttttaacattcaaggagaaaaggcgtatcagctgtacgtgagaatatcaactaaggataaaaacctctaatggatcccccttgttacttgcaaatgctttctttgtctgcaaatgtcacataattgattttgcataggaacaacaaaagtctcaaggaattgaagtttttaataccccccttagcactttactttcaccaaaacctcctctttctagtacatgagcagttttgttctttgtgatgttttcctctacattctttagaataattttgttacttgacaactagacttgtcaatcgtcttagactcttttgaaaaatctaatctttgaaaatgacacaaattcctttattgctttaaggctgttttcattcacccctcccacagccccctccactgcacttttttgttttttgcggggatttttttctttcatctctcttcttttaacatgatgctgtgggtagttttcaagaattctataaagaactcaacaaaaagtgtatttgttacctttttccccagtcctaatatttcttcttaagcttgatcttggtgaaaatttgttgcccaaaaagcagtgaggtagggattaataacgctgaccagtcatctggaagattaattaatcccagtgcagccctgagatcaggaaggaggacaggccaggagatgtttctactccaggcaccactaaggactctatttcaaaggcagatcctgctccttagtctttttagatctgaatctaatcctgaatccagaaaattatcctatgaattctggtttatcaacgcacatgattcctggcaccattgcatagcttcaaggtaaaagagagccttgtttccattattttgctatggtggcttttgggaagacagagagcattcttttgaaagcgggaaacttaaggaaaagttggccaagtacacaggaaagttctaccacaccttaatataaagaacaaaatagatgcttctcatttggggaaagtagctaaaaggacagtaacagtactgatggccttctgtccatcaccttagctccacagggaaaattctgggtgagagcaagcactgtttctaaaatctaaattttttcaggtgaaatttaccagcaacaaatgtaaaagggaactgccatcaggcatagggctagttttatacttcctgcctaacggcaaaatgactgagacatgacttccatggaacagcagaaaatggatgccaaagatatcataaaactgaagttcaatttgccacgtaaggctatttaaaaaccctgatgcactccaagcattcttccttcagagctttcctcctacaattatatcaagcacaagaaggcaccaacagcatatacttaatgtaatgtaaaagtaaacatatgacttgtgttgaattaccattggctggttgacataataagtgtcatagatatttagacattatttctgatcatacaaaattattttcataatttcatattcttttcaattttcataaattcttttcaattttcataaattggagccaatggtttgggaggttttttgtttgtttgtttgtttggttggttggttatttgttgcgttgttgttttccaaacctcagatattttgagaagccttagaaaggctcttaagcccaggcctttttgcctcatgtgcagagtattaataacagccctactgatgtgaacctcaaggaaggaggctattaaattaatccatcactggagatactaatacctcaaacaattaaaacactgaagactctgctggttgccttccacattgtttataacctttttaaattcagtcatttggatcaagagaaataaatggttggtttcatatggcttttgccacattagcacagacacatctaccaaatgtagaagtccagactgagtggatgcatgagagcaaacagatctgtaatatgattgcatttaatcaccgccaccgcccaaattctgtaaaaatatattcaaatatgtaatgctaaaaaaaatgcaaaacaggagactcttactagatcatgctttcacttagggtaggataactgatcttgaagataacttcatagaaaaatttgctggctgaaatgccccaggcacctcagggttggtcctgtcctattccacaaactgatcatggtcttctcccatcttctcagaggagttagccttgcctctaaaatagcaaaaatgccatgaaattatctttctaacctctatagagacttcttatccaagtataattccaaaaatatgatttgagtttgagcatgcctgtggtccttgattctatgatccctaaatcagttctacttttctcactctctctctctctctctctctctctctctctctctctctatatatatatatatatatatatatatatatatatatatatatatatatatatataatctccagtattttttttcaaccacaatttagtgcatttagcgtgttaatgttgggaactgcctgctggctctatgtctacttttgacaatgcttatgtccagataccatacagtgcatttgagagaggaccaaggttatgttttcccacataccagctgctgcagaggtttcgaagtgcctgacccagttctttttcacatcaaaaaggccttcggttgcagatggaaaccttaaagatgaatgtagagtggggtaggaaattcatgtttgaatgctgaaacccttgtcttttttagttttattcaattcccacctcagatcaccagaaagggaggcctctttggtgggtgttggccctcactgggggtaaaaggggttctatttgcttaaactcatgctcgtaggcaattttagggctctctggggctctgaatggtttctccaccaccacctttcttccaccaatagaaagatgttgtccttacaaggccatgtctgagaagaccatggtttaactagtaaaagaagctcacattgcagagagctgaataataccaggctcttgactttgtactgtgtgtcacagtcatgattgggacagaaggaaccagtctgctgaaaagtcaagccagcacaaatatttggaaactaattccactgaaactcttgtatcattaaatcatactattgtagtttcagttaatgtaattatttaatatcaggcactaaattaaatagctttgcacaaaattttagaaaagatcaatcttgtaacaaaatttaatattaacagtaaaaagcacctgagaaaagaaaatatcgatctgttgtggtttatatacttgagttattcttagaactttgtggagattgacactgctctgataaaaaggaagaaaatgttttgaattcaagaatgctagactaatagaaatagcccagtctctctgggccactgctcttcagtatggggtgctctctgtccctccttagcagatggggttgtttggaggctaaaatgagctaagggaagaagctatactgtgcctccaatatcccttatgtgtaattagagtgccgatctgggctgcaggctttattcaatgattcctttcccttacttgaggctttctctgtagagctgttatttctgagcctccattctgggatttacaaaggaaacagaatgatgaagaagtaacaatcagcattttacacacacgcacacacacacacacacacacactttttctaatatatgaggctagtctgcagagtccacagcccaggtgtccatttatttccacttcttcacctcccaaagatttagagctccatgatctaccaaggtgaagactgccaatcccaggttggagaagacccgtcagagtgtggaggtgccaaactgagaggcacaggaagcagacagccacatcaaacttttttgatgaactactgcaaattggtgtttgttctaggaaagaaagaggaagaaaaattacacaatgtgaattgaacataagagcagtgctctttacagagtatgagaagggaggatgggggagaatctgattaaaaaaatgattcattccttcacagacactaacaaacatggctaaaaagcacatgtcagaacacagaagcctaggtagatggttgacatttttataacttccttaagtgagtagttaaaccagcagtcttaattctgttggtcttccaagagtgtttaattacataagtattacctgtattcatttcccacaactgttgggtttttctttctttttttttttttttttttttttcctctgtgcatcctagaaaaactcccaggactagacttaggaggaggcaatcaagttatgtggtaaaacaagagtgccttttctgttggatatccactttagtttcctggcttccagggcataagatgtttagaaactttttttctctaaacataagaattattgtgtaccacaattttgaaccaccgatttccatatcttcagcagctatcaacttgccaattccctttgggtctcctttgtatattcttatgtttccttctgtttccagttgtcctcaaaaagagttgaggggggcatgactcttataaaatggataaaaatgaaactgtacagatgtttgcctcccttgtatctgtgagcatgatctctatcaggctggaaaatctgctttatcattttgtatatttgactattttgtattcagcattacttgactccttatgtgcatggcaatgtattaaaatgtgggatttctattaccgtgt

SEQ ID NO: 343 - DNA, 24968 bp, Homo sapiens
ccgctacccccattgtggtctctgccctccccgcgggcccagggcatgctccgtgcccctgcgcccggtctcggcggcggcaggcgacactccgcgccggcggagacatgaggcgctgccggtgggccgccctggccctggggctgctgcgcctctgcttgggtgagtggccgctgggccgcgctggccgcgtggatggcgagggagatgggcgctggcgtcacccaggtggccagagggacatggtcctggaccacttccagagtgggactcgggctggtggacgggagcggagaagtccttccatcttcctggcccattcggtagtggggagtggggtagcggagtagtggggagctccggggcgcttctccagagctggcatcctagggccccagggtttggcgcccggacccccgctgctctccgcttgctgggaaccagagctgtaggcttggtggcagctccgatgctgcgtggggcaggagatagtgccctgactcgcggcttgaccttggctgggctggggcactgcccctctccgagcgcgggtgcaatctgcccattgatgaaggaggggttggattgctacctgggttctaagcgcccacatgctacgtgtccctgacaagcccgagcccaccgggggcggagtgggggtcaggggcatcctctgggcggcgccccagtggggtccctcggtgcacttgggttggggaggcggagcgccctcctgcccagtagctgggcctgacgcgggaccgcgctggtgcgaagctccctcctggtgtctgggtgtcctttgcctgggtgtccgtctgttctgtgttctttttccagctcaggccaacttcgccccgcacttcttcgacaacggggtcggcagcaccaacggaaacatggctctgttcagcctcccagaggacacccctgtaggtgagtagccctggcacctgctcccgataggtctccctgaggggtgcaggcagacttagaacacaaagtgccccaggcaccacccaagttgctgcgcgcgcccgggggctccttgtttgctctccgaattcccctgggcaatggcaggaaagaaggtcattgctgccatggcgacttaagtctggccagtcctggagaccagggctcccccccacagacagggtcgccccgcgaggcaggcagctacagctgccccttatggctgtgtgaccttgaacaaatgtatttacctccctgagccccaggtctctaggctttaaaacggcctaagaacatccaacttgctgagatatgcagagagaggggaggagaaaggggagatttcacactccttctccctcactttgtgggtagtgggaacccggggaaaagggagagcagagcaaagtaggcacctggctcagaaatccctgcagaaccaggtccaggcatcggggacagtggtgcactgtgggtcacccctcctgccttaatggctgctcccatttccccttccctgtacccaggagcccctcaatcttggatcctgagagaggagttattaccaggctgagcagaacataggcactacagttaggcacggcagacctgcacctgctctgtaacccgtgttatagattacaatctggaaagtggctgatcatcacaaccacccgctgtgaagaataaacatacaaagagggaagcagccagcaggggtgaggccagcaatgagcaccaagttcagggcagtacctttggcactgagttgaatagtcactttataaacagctgaatcgttggtcctgagcatctgccacttttaggaaaagttgggtctcagattctatgtctctccactgtgtttccttccaggctctcacgtatacaccctgaatgggacagaccctgagggagaccccatctcctaccacatcagctttgaccccagcactagaagcgtcttttctgttgaccccacttttggaaacatcaccctggttgaagagctggacagagaggtatggggaggtgtggggagtgctgcggggccactgcctgtagacagacctcggtgggctgaagttcccctggagcacattggttagaacctctccacagagtaggggatgagggggcacaccccaggcacatccactctgtgagatctctgggccacttcccatcagcagagtgggctttactttcatgctcctccttcacacagagcgaagagtgggctcctttaacgagcacctgccagccctgctaatcttttaagcatgttccattaaaaataaatccgtttgcactttgaggtttctgaaagaaacctcacaaagtgatttttcaagcctgtcctgggagaggcacaggaactcagagcaggtcaaggctggaaagggtggttggcagtgagtctgagtttggcagagctcctccactctacacacttgagaacttgcaggcaacagggcatgggctttttcagaccgcatagcagcctggtgtgtggctaactggacctcagctgtggggatgctgccagctcgtgacagcctccactagctgcaggacagggtagagaaaggaaagggaggtctcagggactgctgtggggacacagcagtggagcctgactgtgctgccagtaccccactccctggcacccgcgggatctggcaacatccgatacccttccccattgaggtctcaccatatcctgggagcactgagacaccatggatgtgagcctctgcagagccctggaatgtggagaggtgtggagagaaaaggggagaaaagggaaaagaaagaggaaaagtctttatgggaccttgagcacactaaggtcgacatctcgcctcactgtggcaggagagtattttctgttggagccccaacagaccctctgggtctctgagtttataagaaccccggacacaaaagtcccaaaataaggtctcaagcatggggggaggcagctttctactctgccaggcatgctgtcaccaccacttaccctgctccagggatctattggcacgcccagacctcctctgatgggtgcgtggggcagggagagctccatccagccacaggggtcctatggcgtgtcagactcctggacactcactcagtccctgtgcttcacagagggaagatgagattgaagccatcatcagcatttctgatggcctgaatctggtgagtgcacgtccaaggcagtccctggcagcctgcagtatttgggcctgagaagggtgaggctggcacgattcctccccaagccttcatgggggcttttctgcaagtttaagctagggcccagcaagacctgcccaaagtgcccacaggagagggctgcagcaaggccagggggaaggaaggaaaagaaggaatggagagatcaggctctctgagctgagcttctaatgggtctaacccacattccacagcatctcctcaaacttgccctccccatctgcttcccccacccaggtcttgccctcctgctcagtcacctgagctcaacaccccacagcaaccactttctctcagcgatcatcagtgctcactggataactcaacaaaccccaggggctcactggcctccaggctctccgaccccaactgcctctgaagttgtcactatggaacagtcagatctgcccactctgaggctgggaaagcactaacaactggcctccgccactggcgggatgaaaattaagcttctgcctggtgttccaggactcctcgttgggcaccatctgcctcactgccttttctctcacatccaccccacccaggccataatctagccataaatctactttcatcctcagctcaccatgcatttcactcctctttgcctttgcacatacaaccccttcttcctggcacaactttctacctctttccttctggcaaactgcctcatggattaattctcactcctctaagaagcccacctgctctccaccaccacagcccaggaactctcaaccccatcggatgcatttacacaggccatgtgtgtgcgctggtgcagtgcaggggccccgccctcagtgcctggcatactgctgctatcaccttgaggagatcataaagtgttttttaatatgctgatctttgccctgatatcccagccaccatgactactgcaaaataacacatcatcagacagtcttctgcctccaggatgaaacacagtgtttggcactaagaggctgcttaatgtttattgcattaatgaataaaagaaggaagagagagagagagagagagagaggagggatgggcagagacgtgtacattggagtgatagaggtcgctatccattcatccttcagaaggtctcattgcactggctcttgacccctctgccccttctcaggtggccgaaaaagtcgtgatcctggtgaccgatgccaatgatgaggcgcccaggttcatccaggagccttatgttgccctggttcccgaggtaagtgaggagctgctagaggggctgattttcccacccaggcccatagcctacccctggggctgccctgtggcctggccatggctcactgccctgtggagaacctctctgtcaccacctgctccctccaacattcgcttttattccaaaggaatgttcatttgcttttttccattatacatgttcagtgtagaattgtgaaatgtgtagaaaagtaagagaaactagagttttcaaaatcaccctcgctgtctccaacttgagacattgttaaattttggtgtatttccttctagtcctttttgtcattatagagttttgttttgtttttttctgtttgtttggcatagttgtgattatactaaacatatgcttcctatatcctatttgcacttaagttataacataagcattttcctcattaattgtaaagtttgggtaactatcattttaatagcttccataagtgaacagtctatcatttacagaatcattgcctgatgtttggatatttaaggtgctctaaattttgctatcatgagacacatcaacttctgagcatcaatttgtttttcattaattaggattctttccttaagatacagttcaggatttgaaattactgcatcaaaagcacacatgcccacagggtgttgccagattgcttttccagaaggcacctgtttgctccctcctgcaatgggaggatttttctcctctgccccttgacaatactgaattctcaaagtttaaaatgtttgctaattcaggctgggcacggtggctcacacctgtaatcccagcactttgggaggccgagatggacagatcacctgaggtcaggagttcgagaccagcctgaccaacatggtgaaacagtctctactaaaaatacaaaattagcctggcatggtggtgggcacttgtaatccaagctactcgagaggctgaggcaggagaatcgcttgaacccaggaggcagaggttgcagtgagccaagatcacgccattgcactccaacctggataacaagggcgaagctccatctcaaaaaaaaaaaaaaaaagtttgctaagtcactaggaaaaagatgtctcattcttgctctaaaatgtaggtatatggtccctggtgatcctaaatatgtctgtggttatgagccatctcctcctttttgaattgctgtttcataggtagaccttttatctgtttggggtcttggtttttttcttctccctctctccttgagcacatcccccagcccctcaccacgtctttttgctccaatttccctttccctctttcctgcaccctctctgggcccagcccccactgggtgctcacacattttatcctcaattgttcacctctttttgacacttcactccccgaccccactgctgcatgcccctatgcctctgtccccctgagaatgctgtcactgtctctgaccctcccctgtggctgtgaccccctcaggacatacctgctgggagcatcatctttaaggtccatgcagtggacagggacacaggctctggagggagtgtcacctacttcctgcaggtaaggcaggacacacaggacctaacctggggctgggccggaggggacacctagatggcccctacctccatcgccccaggcccttaggtcggtgcctctatgattcccgagaagtacatgaagggttgggatgggcaggaggggatgtgagagggacagaagccttcttcccctgatgggcccatcctggcgtcctctaagtcagcctgtcccctccctcttccaacgtccccaggaccctcagccctccacatccccagccctttccccaggggctgccacatgggtggagaaccccgtgtaggcccagaatggtcaatagaaaaaagagcagaagagacaacactcaaaagaagcagagctctgattcccctaacaacacaggcccagaagtcccctggactgcacgggtgctggagaaaccccacccctcaccactcccgtgaccttcagcgcgttatctaactttcccagctcagtttcctcatgtatcacatgggagtgataaaaacacatccttgttccattgttctgaaaactacatatgtgtaaagtccccaataacagcacctggcacaagcgcctgacactacccagccagaagggcccccagggaccctaccagaggccggtgctccctgcctgcctccttcaggctgcacaccctctcccccgatgccaggctgcctgggactggcccgcagtcacttgcttggtgtagggtttgaaggtcccaacgtttctctccttcactgtgacttttaacccctggctccctctgggttagattactccgcagacattgccatctgctggaccctccaggccagagctaagcccaaagctgagcccaagaaaatttgctttccagctgagcaggaggaaaaacaaaggcccaaaagggaaccttgtgtttttcactgagggtgtgggagggaaagccccaagtcctatgaaggagaacctgggaccagaaaagctgagtgctctgaagtaggaacctcagccctgaggtcctgtaatgaggggcagtgaggacccccttcagaaagcagagcgggcattcctggggctggcctgcattcttgctgaggtccagctgccccctaattcttatagaacctgcactccccatttgccgtggaccgccacagcggtgtgctgcgcctccaggctggggccactctggactacgagaggtcccggacccactacatcaccgtggtcgccaaggtaacacagcaggacaggggagcatccagtgtctcctcagcccttgggttggaaccaagttaggttctacaggggagtgggagcagtttggagagcaggagacatgatgggcgtggggaaatagggagcagctgctcggaatttttcctgcctggacatattctccagggaggctggggtctgtgggctgtgggagggcatatgcctcctcgaaactaatgggccaggatcccccaggtaagaccaggtgggatggccaagagaatggcatccccctcagatcctcaacagcatggcctctgggcacctccctctcgctggccaggcttgctcacccacctcctcctctctgtgtgcccaatcaccccttctgagcctcagtttcctcatctgcccacccctgaagctcaactaagttcctcatatttctgaagtgtgtggtgtgggaaacattggaaaccagcaggtgcccaccaaagcttcttcccccacaaagagcgcaaaaccctagcagcccctctaggcccagcactttcttttgcaggcaagcccctgctggtcacagcctggcttacaggccatcccactgcagcctgtaccaggaggcccgagtcagcctcgcctgcccatagctgcacgggctgggctggttgcacatctccattatgatgctcagtgcggggcccaagtcctgctgttgtgggtccctgacactcagcacaggccaagcacagagtagatcctcaggaggtgcttgaggcttggtttctggctgggagggggaatttagctctgaatgccccctctcctgccactcatctgatatgatttctctgaagagagaactaaccccacttgcaaaggaatggtggcactttaacattcccaacactcctgtgagagaagaattatctccgggtgacacagaagcaaacagaaacttggagaggacagctggcctcacagccataggtggcagaagccaggttttcacggattctgtccaattccacatctcaacttgtcttcactctcctgtggcctccgattcttctgcaggatggcggtgggaggcttcatggggctgatgtggtgttctcagccaccaccacggtcacggtcaatgtggaggatgttcaggacatggcccctgtcttcgtgggcacaccctactatggctatgtgtacgaggacacccttccggtgggtggctgtccccctcagccagcgatccctccaaatgcctcctgccctgacccttgtgattttagggaccccctgctggagatggctggtctggtcccggttgccctcctcacacagaggccagctctggactcacccagcctcaggccatgaactggcccttttgcccccaactagaccatgagctccccatgggcagagaccaggctggagccaggcctcgctaggctacagcttaagaactctgtgcaattgaattgctttctcaatttgcgtttgtctgattattcttgactttttttttttggaaacggagtctcgctttgtcgccaggctggagtgcaatggtgcgatctgggctcactgcaacctctacctcctgggttcaggcaattctcctgcctcagcttcctgagtagttgggactacaggtgcacaccaccatgctcagctaattttttgtatttttagtggagaaggggtttcaccatgttggccaggctgttctggaactcctgacctcaggtgatccacccgccttggcctccgaaagtgctgagattacaggtgtgagccaccgcgcccggcctattattgactttacaaagcaaaatgaaacactttttgaggacccagtggtggagacgggctcagagtgagggagagagatgccggactgctctggatgggggctgcagggtgggccagcgtaggcccaggccatcccactgaggagctaaggggaggaggtggtgctgagggacagggctcagggtaggctccaagggaagaggcagcacctgggctgggttaagaagtagcctggagttgaccagagagaaaggcttgtgtaggggggcttaagaggggacaacaggcagaagtcaagcaagacttatatagttggggcagccctacgcccaaacccttccagcagcaccaaaggcccacaggataaaatcttaattctgggacctcgcatttgaggcctggcctctctcccacctcttccttcatgcacctctggggtgggatgaaagcaaaagatggagagggcagtgaaagtaaggctagaggttagggagcagtagaggcaagggctgagtgtggtgtgtgggccaggagttggtgcaagaggcctgagaatccctgggcagcacaggtactgacccctactggtgagaaagaagcaggggctcaggctatccctccagccctggaggccagtgggtgcttcgatccccctgcagaggagagtagggccatgctccaccgccacgtagaggcctgaccctttcctaggtgggggtagcacctccttttcatcatggagacattgtttggggaggggagggtccccatattgcccatcaggcagcggctgttcctgtttccccgagggctcggaggtactgaaggtggtcgccatggatggagaccggggcaaacccaatcgaattctctacagccttgtaaatggtgagtctgagcagctttgggggctgcagctttgactctctaggtgaccagagcaaggttcctcaacctctctagattccagctccctcacctgtaggaccaggattacaagatgtatggagaggaagggctgtgtccaagacaagcaagtctctgggttgtgtgcttcggtccctgcctgtcatgatatccaacagccaagagagcatggggcaggggcgctgagagcaacacggaggtgctaacccatgctcctctccccctgggtatttgctccttgatgggaatgcgtggcaacatttctcacactttttaagtggctatgtattttcctcattctttttaattgttatcccacagcatatagatgaattaaatgaatcaaatgcattggtgatatggcatctccctagtgctagccctatatatggacaagaaaactgaagttcagagaagctgagtaggcatcccaagtttccatcattgtatttgaacctgagcctgctagctccacagtctgtgctcttcccacagctgggcagcaactgagccagatgagctgtccctgggccaggccagggcatcgcatctggtgcctggtaccagaagtgtgcatgtctatatgccccggcctttctctaggacatgcctgtgcatactcactttccagcagctcacatgtgggctgccagcctcctttccccagcctcacaggacctcagctgccttccttcccatcaccactgcaaacctttacccagtccttgagcacccaccccatctcctgcctgtcccactccacaccctccctctcctctctttattccctccctcctgtcccttctttcccccctccccttccatgtccgtctctcactgtatgtcctcctgcttcctttctcttttcttcacacacacacacacacacacacacacacacgtgcacacatgcacatatagtattatgcataagaaaagggacacagtatggaatgtgggagctggacagaagtgagttcaagtcccagatctgcactaactgtgtagccttagacaagttacttagcccctctgagactgtttccatgttgacaagacacagatgacaggattccattctatgaagacttccctaggcaatgcaggacgatcctgtggcacgactcccctgcgcctccctgtggtcctgtgcagaacttcagggtgcatctcccttgacagggaacgatggagcctttgaaattaatgagacatctggagccatctccatcactcagagcccggcccagctccagagagaggtgtatgagctgcatgtacaggtaccctccctctagctttgtcttccctgcccacctttggccctggaagtctataaaggtgaagacacccaggccctttttcctggggcccatagtctggggagggggctagatgttgttctaaagagcacctgcaccagacatgaattcacaaacagggagtcacagaaaggcaagaggaggtgcaactgaagcagcaatgcctgagcatgggtgggatcctgcaggtgcatgctgccagaggcgggcattgggtgggtgggggtggagtgaaagcattccaagacaggaaagtgcagcaagcccaggctggaggggagagaactgatatattgggggaacaacaaggagtcagttgaggccagagcagagaaagatgggcagcctggagaaggaggaaacgttggactcccaggctggggccagaggagcaaaggtcctgaatgggaggtatggatctgtcgctagagccgggcatgtgacctgtgaagtcacacaaggactatacttaggaggatcccacactaagcttaatgctcgctgtttgctgtcttggaattcttaataatttcaccaagggatcccatatttttatttttcgctgggcctgcaaattatgtagctggtcctacccaagagcagtaaggagccattggaaggttttcagcaggattacagccacttgaaaagttcacctggctgctcaccagaccagtggagttcccaaatttggagatttgggccaaccaagattttcaggatccactcccgggcataggaattcagtgtgtttggggcaaacccaggaatctgcgtattataagcacccaggtaattctggtaccagtcccagccagaatttgagaactctggtctcaacttgggttcagagggaactagatgagaggtagagccatcggccaaagtaacagaggaagacagcctgtggggctgagggtaggtgggatggaagaaagggacaaaatgaaaagtatgcatgaggcagattgcacagaatgaggaaattgcctgatcttgagggaaagggatgggagagggatagatgaagcccaggtggtcccgtgccgtcaggagtacaggacagcaggcaagtgaagtaggtgaggaaggatgcatttgaaggctcgagggacatgcaagttcaaacatcaaaacttgggcatacaggtttggaattgtgggagagaatgtcaacctacaggtagctgtggaaggcatgggagggaataaaagcacccagaggaagaagaagagagaggacaattggccaagcacagctgcgggagctgtgtgaagaggctgagagtgaggaggaggagaggggcaggtaaaggaaacccaggagggatcagagaggttgaggagaagatgtagagagcagagtcacattgctgtgggaatagagcacttgggaaggagaaagagtagcagtgccacatacagtgtggaagtcagggtgaagaatctgaatgaggggtgggatgagaatcaagagggatagcagtgaaagtgtcaaggagtggagtccaggtagggttattttaggatacaaaagaccagagcatgcttacagaacaagggaaaggtggtcttgaagaggttcataggatatctgccacatggttcacaaggtacctatgggatctttgccctggctttgtaggctgtattagttatcagctgcataactaattaccccaaacttagtggcttaaaacaatacacattcatatctcatagtttctgtggttcaggactccaggctcagcttggctgggtcttcggtctccaggtccctcacatggttgcaatcagattgtcagccaggactggggtctcatctgcaggcttgactgggaaagggttggtttccatgcccacccaattattggcaagactcagttctctgtgagctgttggactaagaggttcagctccttgctggctgttggctagaggtcaccattagtctctgttaactgtagcttcctgcttcatcaaaatcggcaagagagagagttcacaagacagacgttacaatctcttgtcatgtaatcatgaagtgatagcttgccatctttgccatatattatcagttagaaccaagttgctaagccaggacacactcaaacggaggggattatacattctgcaggggaggtaggagctggaccatatgaagggtccacctgccacacagccatagccacttgtccccatcccaggtgactgaaatgagccctgcggggagcccagctgcccaggccaccgtcccagtcaccatcaggattgtggacctcaacaaccacccgccaacattctatggagagagcggaccccaaaacaggtttgagctgtccatgaatgagcacccaccccagggagagatcctgcggggcctcaagatcaccgtcaatgactccgaccaggtgtgtggtcctgccctccgctctgccttctcacaaacggtatgaagccaaggtcccaaagctaagtgggtctgcatcaacctgctctgcgtatgtagccgggaccaggtgggccacaaaatgaatgaaacaagaagttgtaaccaagggggagaggagggagagtaaccaatcaaagactatctgcttagcctaaaggcactcacagtccattcacaaggaaaagtcagatgcagaaactctcttaataatatctcccagggttaagggcacgtgaagacttctatatagtatgattatgaatttctatcatcattcatcttccttgtttccactctccaaattctctagggagccaatgccaaattcaacttgcagctggtgggacccaggggcatcttccgagtggttccacagacagtcctgaatgaagcccaagtcacaatcattgtggagaactcagctgccattgactttgaaaagtccaaagtattaaccttcaaggtaggtggtgccctgaattcactgccctgaatgggagggtcccaggaattcataccagcatcttggttcattcctgaggggtctcttgtcactctctgcccttcctggccctactcttttcttctccagccctctgcccctcctgcagattgctcacagatccagcctcactgagcttcctggcttccacaccacaaccagccccaggaatgcaggtggtggtgtgggatcaaaggaaaactaccaatataatttgccatgttaatagattgagtaaactattttattatcaagatagatgttttatcatatgccttgacatttgtcatctcttctgataacaatcttagctgaagaggaaaaaaatacttctgtgatatcatttgtaattatgtaaaatcataaatgtattataaaatgcatatcatatatgaacatatataatatgttaataggaaaagtaaatacttcactgacactattaaaattatcttatttataattatacacatatacacatactctcctatagcctgcatcatgcttaaaagtgaaatactattataaaagcaatccatgaaattaggaacaaagcatggatgcctgctatcaccactactatttaacacaattcctgaaataacattgttcctggataaggaaaggaagtaagaagttcaaactttagaaaggaggaaaaaagacagtcattatttgcaggtgatgattgtttgcttagagaatctgagagaaaagacaaaaaaaaaaaaaaagaaactcttagaaactcagcaaaattgccaacatggctgattacaaagttaatgcacaaaatccagtagttttcctacatacaaaaaataataagaaaatatgggataaaaattatcttttacaataacaaccaacacataaaatttgtaggaattaccataagaaatatgtatcatgcaaatgatgaaaaatgctaaatttcacaaagagacataaagaaagagatgtaaaggcataccttgtttaaaaagttcaaactctccttaagttaataaagaatttggttgggcgtggtggctcacacctgtaattccagcactttgggaggccgagggggacagatcgcttgagcccaagagtttgagatcagcctgggcaacacggcaaaagcccatctttacaaaaactacaaaaattagccaggcattgtggtgcacgcctgtagtctcagctacttggaaggctgagatgggaggatggcttgagcctgggaggcagacgttgcagtgagctgagatagtaccactgcactcctgcctggaaatagagccaagactcgttttttttgttttttttgtttttgtttttgttttttttgttttttggttttgttcatttgtttgttttgagacaagagtctcactctttcccccaggttggagtgcagtggcacaatattggctcactgaaaactctgcctcccaggtttaagtgattctcgtgcctcagcctcccgagtagctgggattacagacacacatcatcacacccggctaatttttgtatttttagtagaaatgggggtttcaccatgttggccaggctggtctcgaactcccgacctcaggtgatccacccgccttggcctcccaaagtgttaggattacaggtgtgagccactgcgcctgacctatttttttgtttgtttttatttttttaaaaaaagaatttaatgcccccaattaactcttccctagaatgtcctttggacaggtggcaacaaggcttgacaaaattaaactggtttttatatgggctaataaacttataagaatagttaagacaattggaactggaaaggatatgcagctcagtggaacaaaataaactgaccccaatacagatgggaatgataagaaagctagcattacaagccaattgacggggtaggggaagatgccaggccttagaggtgacccttacaggaatagctggttggcagctgcgaggaagatcgggagacacggcagatggatgccacatcagtcctggggagatgaggtgggaaggctctctgcagcatgagtgcctacccagacaagtccccattttccccccttcccagctcctggctgttgaagtgaacaccccagagaagttcagttccacagcggatgttgtgatccagctcctggacaccaatgacaatgtccccaagttcgactccctctactacgttgccaggattcctgagaacgccccagggggctccagcgtggtggctgtcacagtgggttgggcactggcccagggactgggtgggataggaggccttgtgaagccagacaaatctggaaggtcattgcagtttgagtggcagaacccacactcattagctgtccttggacaagctacttgccctctcttagcctcagtttcttcatccatatgatgggtattacaacacctcacaggacagtaatgaggatatatgtgtaaacaacaatcacagggcatgggacccatcccctcttcctcatttataaaggagggatgagtgttttccagatctaaatctcttggctctttcaatacttaaaacttcttggaggaaaactagggatcccgggcaggtctctccaccaatttctccccagttgggcaaaccccaaatccccttgctttgtggttgaaagcaaccctcagggcatgggagctgccaacataccctgacaaagaggcacgtgccacccagggctctttctcttccaggctgtggatccagatacaggaccctggggcgaagtgaaatattccacctatgggactggggcagacctgtaagtagatccagaatccaggacagggccttgggcaaggggattggaaggctgagggtggaggaggtctgtggcagaggcaggaggggcctgggagggacaggagcctgggtgaagagaagtggagagaggcagtggaaagctgaagcagagggtgaggaagttcagggcccaggacctcaggagccaggcaagcagggctggctggggagggggcaggccataggaagagagaaagactataactggagttgctaagctggatagtgatagatgggtgagtccacatgtggatctacctcacttagattgcaaggataggagggagcaggtaggacactttggaggagctgcatgacacctcactcctgcttcaggaggcagctcattattgcaggcatgtgtatgtatgcacatatgtgtatatgcgtgcacacccatgcctatgtgctctgcctggcagcttcctgatccacccatccactgggcttatctacacccagccctgggctagcctggacgctgaggccactgccaggtacaacttctatgtgaaggcagaggacatggaaggcaagtacagcgtagctgaggtgtttatcacactgctggatgtcaatgaccacccccctcagtttggaaagagcgttcagaagaagacgatggtgctagggaccccagtgaaaattgaggtaagttttggaggcagctgagctcccctaaaagcctgggtccagcagctccaagagatactgaggcataagaatttcattgaagataaaattttttggcttcccaccatggacaaaggactttaagacattttgtatatccccatccccacctcaacagagaattaaactctgagaaagaagatattgctattcaacaaatgaaaaaaacaggccaggtgggttaagtgtttggcttgccttcacatagctggtctgcctgcttttcaaaagagtggttttctcaccgcactttgtcattttgccaatgtggcaaaaaggatgaactctgaaacccagcagacttgactttgaatcctgactccctttcttatacctctgcatccatgggaaagccactttgcatctaagctttcatttctgcatctgtaatatggattcaccaatatttgcttcctagacttgttctgataatggaatcggctagcccatgtgtaagacctacgtaaaccctggcttataggagagcatgcattctgttcctttcccaactcaatcctctcaaaataggatcaggaccatttcccatcaacccagcaagccccatatgacgtgctgatttagccagagtacacaaggattgtccccaaagcccagctctgtctgtctctccctgcgcacaggccatagacgaggatgcagaggaacccaacaacctggtggactattccatcacccatgcagagcccgccaacgtgttcgacatcaattcccacacgggggagatctggctcaagaattccatccgctccctggatgccctgcacaacatcacacctggaagggactgcctatggtccctagaggtgcaggccaaggaccggggctccccatccttcagcaccacagccttactcaagattgacatcacagatgctgaggtgagtacaaagccatggtcaggaaaaaggggtcagcaggccagctcagacctctctgcaacgtgggcagagcgagaaggaccatctccaggcttcctccaaaagacactcaacgttatcaaaggcagcctgtgccatcaaacacacagtctttggaagcgggttgagtttctagttcaatacttattaatggtgtgactttgggctttgctaagcctctgttacctttcctgtaagatgggataaggatgcctccttcacacgggtgttgaaaagcagagtgaagtcattatgtgtagctctcagctcagtgtctggcagaaaactagtcacttaagagactcctgatacatctgggcagatggaccccctcccccacttgccacaatcaaaggcaagtgatctcctaccatctcaaggacagactccagctaaagcaggagttctgaatccaaaagaggttgctcgcattgcgttctgtctgagcatattgtaccagagagtggtctgcaccatgctgggtctgcgtgcatttttctggagaactgcatgcatcatgctctctctgtgtgcattttcctggacaaaagcccatagtgcctatcagattctcaaagggactcctgactccagaaagtttaaaaaccattaggcttaaggaagcacatacctactctgtactccagggaccaggtgggaacagctgagtgcagggagtggctttctctttcagaccctctcccggagccccatggctgccttcctgatacagaccaaggacaaccccatgaaggccgtgggtgtgctggccggcaccatggccaccgtcgtggccatcactgtcctcatctccaccgccaccttctggcgcaacaagaagtctaacaaggtcctgccaatgcggcgggtgctccgcaagcggcccagccctgcgccccgcaccatccgcattgagtggctcaagtccaagagcaccaaagccgctaccaagttcatgctcaaagagaaacctcccaatgagaactgtaacaacaacagcccagaaagctctctgctcccgagagctccggctctccctccaccacccagcgtggcgcccagcactggcgcagcccagtggaccgtgcctactgtctctggctctctcactccgcagccgacccaacccccgccaaaacccaaaactatgggaagccccgtccagtcaactctgatctctgagctcaagcaaaagtttgagaagaagagtgtgcacaacaaggcttacttctagtgtatgccctatgaccccccatctttcctccgcccctgacccccaccaccctgctgctcggactatgctccccttcctctgctccttaaggtcactgacccctgttttgcacaatggtataatccccactgtcctcatctctaccgccaccttctggcgcaacaagaagttgcgctctgacagggctctagtcagggccttgggcaagacattgggctctaggatgcaattggcaaatacgtccccgttactcaaatccttggcactactacaatgccctccattcttcagggctgagaattgacgagaagccagctcacccatcccagacctcacagtccctcaggttctactgggatctcatcatcatccttagtcaagcagcagggccctggccacgtggagcaacactgactagaatctggatcctgacgcctgcagctgagagcaggagcaggaaaaggaggctcagcactgtctcaggctggaggtcagcgaacctcgtgggctgtaggaaagcaaatgtaggtaaggggagagcaaggatgcacagaaaacacactgactgtgggactgtgccaggatgcatttggaaagatagagcattctgtctgggcagagactgtggaccctggtatgcccacgtgggacagaggacacagaggtggaagattgatcttgccaagagtgagggcagatgtctccagccaggactgccctgagccgcaaaatgtcaaagctggagctatagaggtagccctaaaggcaactagaagagcatcagggctgctctctgaggagctgccccaccagccatccttgaagagacaattcagggcagttgatgaatatcagggctgagatgtggtgagacttccgtttttatccagctcttttgctcacatcgcgtaaccttgggaaagctgtttaaagtcgctgatcatcctcttcctcatctgtaaatgaagaaagtaggccctgtctacctcacatgcaggtctagggtgaggattgaagaaaatagtggtgatgagggctttaaccaagtgcaaagcggcatgaatgcaaagtatttttctgcagcccagttctgtgggtgcagctcttccagaaagtattaggagcctcacatctactctgccaagcgccccagcaggcactgtgctgggcttaggggctaccactggatgatggcattgccgtgactcacacacctctacttctgttcttccctcactccatccccgctaccgtcctggccagctaccgtcagagagaaccagagctccaagtctttaatttgccaagatgaagaaaatgagttctcaaggagggaatgctttgcttgaggccacacagcaggttggtagcaaagatcttgtctagccagggcagcccttatcagcttgtgacaaccttccccaggacagaagtcatacaaggcctctggggttaatacaaataggttgtgccctgctttaaggaacctgctatcaggaaatctacatgtgtgcacagagagagaaaagtagaacagttctttgcatttggctctacttactaacaacccctctagaatacattggtgatttcatttaaagagattgtatgcatttgtggctttcctgatttctgagtctgtgtttggaggtgttactgagatgtgccagtgtgcagaatccttgctggggtttctacagtccccaacgtgaacagtattaagcaagaggtggactcgagcaatccaggagcccagactgagcaaataagtactttccagcctgtgtttcaggagaggactgtgctggatcatgcttgccctccacagggaatacagcatccttacagcttgcatgcaatcaacctcttttgtaaatggaaaataaagtctgttacccaaaggccatgctgatcccctgctccctgctttcatttatgtttgctgacctgtggagaccagtctttctgacacacagtgaagctcaacttgcctcctggctgcttcagcaggtggatccattcttcgacccccagatgtgactctaaagaaggctgaaaatttttgtccaaattgccatgcagatatcttgaacagcaggacatttgcaggccttgtctactggacttttctcccaaacaggacaagcccaggcagggctgcatggagaggaatggaacctggagctagaattaattgcccactctcccaccctaccagtgcagcccggcaagggcaggaattgggaggcctagggtgggcatgaaagcttgggaagcactgtcgtctctcagacaggcgtcctaaagacctctaggctggaagcttgggcttgcaagtggatccgggaccgagggtggtctcttggacaaccccaggaacttggaccaaggcagagccaatcttgcaaactggccatggatggggaagtgcccggtagccagcatgagccacactaggaaagaggaggagggtgcagccaaacttaaggcaccggcaagtgttgtcagcactggaggagaccccgccagtggggtgaggccagccaagtccctgtgttacgaatggtgggccaaggggctgtctgctaggtcccagtaggacaggcagagctccaggctggcaccatggtaggcctccagggaaagagctgggaggcaggaatggcacactgggcaggcttgcccattcctggccctgagaatggagctgtagcctcatggacaataaatggatgtgacaccaaatactctgcagagtcattttcctcctgcggctgagctcagatcttccaatcacgtgaaataacaaagtcctttacagtttgacagccctaggtctgaattctggttctgccattaattgtgactttgggcaagaggtcaagtctctctgggcctcactttcctcattaacacagggtgcaaagtatggttgcagagaggatgaaaagatctaatatatgtaaagtgcctagcaccggctttgtatctacttacacaagctcagtagacacttgccgtgactgtggcccacatactagaacaccatgtcctgaaagagaggaccccctccatgcatcctcaccccccaggatgtttccacccacctgtaggtccagaagcttttacttcatgctagaaaaagagaagagagtggatccagaggggagtggaggacagggcagatgccacagcatctgtggcctgtgtagccggcagcctgcatttgggcgttgacattccaggggagttaggaacaatgagaggtctctaagaacttgtggcactctgtcctcaagcagctgtccctcagaatcctgctagaaaagtgtgatcagagctgggaaggagccaccatgctctgcttctctaaggatttcggtgattctatttttagggactgaaggcgttgagggaatccaaggccagtccacctgccaggggtgttggcatctgttgacaggcagtggcacatcctgacagtcttcaaggccttggccaccaagggatggagagggagaatggagaagatgccacatgaggaatgaggcaggagactggcatgtgccacatggaggaccccttaggaaactcacaaacaacctagggaggggttctctgaagggcctagtttccagaatgaggcggtcatggcttaagcgaccatcatttgatcaataaagcagagtagcaacaggctgatgttggggacatcggtttgatgttataaaatcgtgcacatgtaccccttttgaggcctgaatgaggttcggttatttattcatttctcaataatttactcagccattcctagggtgacaagtttggagtatatcttctgtgccaggctctcttctaggtgttaggtgtatgtctctaacaagatagaaggaaagaagaaaagaaaaagaacaacattcctctctttaattgctaatcgcctgggcctagggagtcttcattttaaaagcaagtagccctgcttacaaatgtctcctcaatcaaaggcatttgccttaaacttgtatggtctaaactctaaataaataagcttctcaagggcatgacaactatatcggaaactgtagcatcttttcaacatgaattaaacagaacatgtgaaggatattagcccagatatcatgttattacatatatatatttataagtatacacacatatgtagtcttaataagatgtgatattccaaatggccctatgtgctgagtcacattcaaagaaagcacaaactgatgtagatgcctgaaatgatggtaacatttattattgtgacatttactgagggtttactatgtgccaggtattgttctgagaactttgtatgttaaaaaaaaagcctcgtataattaccagaataaccctatgaggtaaggactgttattatccccattttacaggtgagaacactaatgtactattattattctattttataggtgagaagactaaggtacatgaaaaatagtaacttccctggtacaacaaagtcagtaagaaaaccaaaatttaagcccaagaaaccacattccagccagggtctgttcttgcatccccactgcgaaattgccttattcaatctgagtaatgtgaatctgtactctagagtttttcaaggggcagcccaagcatcttaaaaagtatcagattctcagaaatcctccctagaccattttccctctccctaaatttctatgtttacagaagcaactgaatacttccctacccaccaacatgctcctggctctcccctgcactgcttgctgctcttccacagcccttctctcatcctgacccctctgtctcatgtgcaccaccaagcttcttttgcttggcttgaaggtctgaacatccactctcaccttcatggtagcccaggctatttcatgatggtgacaccctcaagatccgtagaccactgtattagttcgttctcatgctgctaataaagatacccgagactgggtaatttatagaggaaa

SEQ ID NO: 344 - DNA, 317141 bp, Homo sapiens
tattgggcagtacaggtctagatgatcaaatgcctacactgaatgacttcatagaatatcactgttgagctgacaccgatctaaaagattcacatgtcggagcaagactgttagtggagtaaactcctcgagtgtacaggacccctttgttcttgttctattttgtttttaacagcttgctctgctccataaagatccatcagtcaccctcaaactcttcggaccttctgcctgttcattcctatgaagctgcgtttgctaaggtactcggtgacctggagcaaacattctaaaacagcgcaaatggcagaagcagagcctacaggcttcttgtcgggaatccgttcggagtatggaaagaatcccagtgtctgtggacttctgggttgtctgctgtgcagttctgaaatgtaaccctgggattcctaaaagaatgtcaactctgtgctttggattttctgtgagtctaaatttcacaaatttaaccagtttttctttcaaataggtcccaacttcttagacaatgtgtctcagtgtggggttcagaaaatatggctgctctagagaaggtccttcctgttgcagggctggttttccaatgtagagcgactactgaggtgaactttcagagctggcataaggattatttggaaatggtaacagaaataatacagaagctgggggataaattgtagatgtttcggggaaaagaaacagcataggtattatgaagttaatccccttcccataggccctaaatttctgcaaggttagttgagagagaaattaaactgaaaactgagaaataatccacgaaatgaagataagtatctttctttgtttttttatacctctactattttaccccactctaagcccttaaaaaaaatcaataagcagcctttggtcttgacatttccagtaatataactcaatagtatgggaaatattcatatatgtgagcacattacatggagcctggagcatagtgggcactaaatgaatggaggccattactacaaatgttatattgctgaggaaaccacccaggcgacatgagaaaaccagaatgacagtatggtgccatctcctccgtatgtgtcacttttctgttttatcttggttctctgaaaagcagcacgtacccattatatcttctctgtacccttctgaatggaatattatttcttccttattaacataccttaattaataatggtgtctttgtatagctactatgtcagaacacctcagtggggtaaaggttaggcatgatattgctggctgtctttttatttctcttattaagttgaaagagaatatggttacaaagtaataagcatgacttcatatggtcttgaataggaatgtgatggttttcttaaaatgaccctgggtccttagttttgggccagataaagacttgtgaataatttctgaatctttttgggggggataaagggatacttttattctttacccattttacagtttataaagagaagtgccatattaaatagtcagaaacaaggattgttttctccaaaattagcacttagttattatatttgctacctaaagttccattgtcatcactgaactgttaactgcataaagctgttcaagaagaatttgtccaatggcacaaatacacagttatctttgcatatttacctgaaacacagttgtttgcttgtttttctcagagactgcattagaaataaccatatgtaacactgcagaaacaacctatagttgaacatgacaacagcaattttgttaaggttcagttttgctttttctcatttgttccatatttccactattgcccatctaatatcagtgggctttttacttaaagaagaagagtgagaaagaaagagagagagagaattggacataaatcatttattataaagaaatcaatttcaactcctcttcccagaactgaaaggaagagcttcgttaggatctcttatcctacttagtttttagaatccaaattatatttacttcctataaagtcatgacatgcaggctataacaatggtcctcccaaatccatctgcatccccacattcttggggcacctctcttctttttcaattccattaatggctcaaagaccacaggcaccttagattcagctacagagaatgatactgggtcacaggctcctgtgacaatgacattttctttaggagttcagcaaaactgcctcactgttaacttttaatgaacatcttttcttcctttgaaaagtttcagtgaaatgaaacaaatgagcaatttctcctttcgtctccactttttgagggataatatatagtatcctgggtgctgaagtctcctgtgacatgctgaatttggggtgtgccaatttttcccacagttacacacaaatgtaatataagggttttgggtttgtttttttttccccaaagcccaggtcctaagatatcttatagcctataatacaccaaaaagtaaagaggctccccacctgaatttgggccccactgttcatttcagaggacggctgactcaatggagagctcccatgggaggcgtgccaacagttcctgggacaatgagtggcacagaggcgccacagtcgttattttggagcattattctttcttggtttccacaatagctgggatctcataatttaacattaagcctcttttcaactatatggaagtgtaataaggtgatttagccaatgtgcctgttcgttgtcccaaagattctgtgatctattatgctgtgatgtgtaaaaagaaaaaaaaagggagaaaaatggtgaaaaaaacataaaccaactaattatcaaatacattaaaagctgctttgcgagagctattatttattggcatttttaataaatcaatatagatataggaatcggctgcaaaagcctctgggttcattcacataatgaaagcccaattaatatccgcaagcacagtgcactgccggcaacagggagctacaaggacaatcactggcttccgcagccaacactgacagctgcagtgccctgatagaaaacagcttcaaaggcccgatccccacccccacccacaccccagcctcaactgaacactcccttcatatctcacccgcactgaggcaaggcctgcaggaacagatgggacaccagaagcaacccatggctatctgtgatgtcaccaaatgaggcattctgggatgctgtttgggtggcaaaaaaaaaaaaaaaaaaaaaaaaaaaagtcaaaagaatatgggagggggatgaggagggatgaggaagaattttttacgaggtaaaattagcgtggcaaggcaaccactgggttggagaatgaatgaactgtagggtggtggaagaggtcatgctgcatacagatcggggccggcttacatttcagttttattttagtgtggattaagggagctttatatttgtggggctcacgagaaaaacatgtggcttcatgtcctgtaggcctgtttgctttgaattcatccaggccacaaagcccctgccagctctcagagctggtattgggacactactgcccttctccccaacccccaatcactactatttttttcaaacaggatccaaactttcttccttaagatgttgcatctcttgattttttttttttaggttttttttttttttggctgtcccgaaatattaatgaatatctgactagactaaaaacctgagttctaaaaatcacagcatccaaaactgctgtttggacctcctgttctgagcagcgatggggtagctagcacacatatggaggcttaaagtcaatctgccaggtgctctgtcacagcatacactgacatcttggcacccagggttctgaggaagccaccagacaccagtctagtaaaagcagaaatgtagaccttgactaaatagataaagagaaaaaactggtcctaccaaaaatttccaattcttgcggagattgagtggaccagaggaggttataagggaaaaatattttcctttgccttgtaatcaatataataataataattgcaattcattaactaattaattatattcttacagccctttagagtttacacacatctcccgtgtcaggaacttttaaacaaggactgcaatgatactattgtacagagaaggcagctgagacttagggcagttcagtaacttgtttatgatcacagttaggaaatgtcagaggtgaggcttcattcccagtcttccaagtcctctacaagacatggaagccatttgaaggaatccatgaaacaacccatgattggtgacatgatttggttgtgtccccacccaaatctcaccttgaactgtaataatccccacttgttaagggcagggccaggtggagataattgaatcatgggggcattttccccatactgttcttatggtagtgaatatgtctcccaaggtctgatggttttataaatgggagttcccttgcacaagctcttttgcctgccaccatgtaagacatgcctttgcttctcttttgccttccaccattattatgaggcatccccagccatgtggaactgtgagtccattaaacctctttcctttataaattacccagtttcaggtatgtctttattagcagtgtgagaacagactaatataattgggatttgtttgtttgtttgttttggctcaagaatcattactctatgagcatatatgtccaactagagtgtctgtcctatgttatccttataatagcacttgttatgttgaatttgtacttatttatttatttggctgtttttcccccactagattgggacctctttgagggataggcctttcttattcacccctgcatctgcagtgttttgcataacacctggcatgtggtaggcatctgtaaatgactattgaagtaggatggataagttaatacataaacagatggatgagtgggtggatggacagataacaaaagtcttattttacctatttgtctgatttagcattccctctcatgaccttgaaggaatggaacatgttgggataaccatttctgtatttgttaatttaccaaaaatactgtaactggccttaataagaaaaagaaaagatgactgactccgataaacaaaccagaagaattataattatacaaaaacaaaccaataggaaaataaggcagtcactagtggcatttatttttatttttgttttattatcagttcttggaaatggtctctgcagacaactcagtaaagcctattcgggagtgctctgctaagtgagataaatcctcctggtaggcaagctcatttgagtgcttgagttagttttttggatgacattcaaattagcatcacttcaataaatgtttactgggagtcctagatgtgctggactcagagctaaatgtggaaaaggttaccaggtacagcagagttggctttagcccagagggagttaacaaactaggagagattacacagaatgcctgcagaaaccttcagtataggactgtgcttccagtactcaaagcactcagaagagggtaacacgacttccaatctgagttgggggcagggtcaaagaggcttaatgaatgaagtagaaggaatgcaagtttaagtaggaaccagacatggagatattgtggtgagcagacaccagatggtgaaatgtatttttttaggccatagccaatgttgcagtgtgacaaagatgttccagtgcactgggaggatgtgcagcacatttctgatcatatgactacaaattaaatttgttggctaaggagacacgattggaagaaagttattagaaggaacattaccgagctctacacagaaaggtgagagagtttaataatccagaggcataatacaattcattccttggagttttatcttaaatacagaataatgctggaaaaatgatggtaatgaaaatagacttgcccagcaaagataacaatgataagattcgcaagaccgttgatttgtaaaaacatgaataaacacttaaggtggtggaagttatcggatctttcttcaagtaatatgagtattctgcttttgagatggattgctaagcagctcatggattaaccctgcttaataatgctaaccaataatagttgccaggtattagcatgtactatgtgccaaacgctgtgctaaacgctttaagtttggtgttatgagaataaccaccctatgaggtaaccatttttcttaataatctctttttctttttttttttgagacaaggtcttgctctgccaccttgttatcatgcagtggcacaatcacagctcaatgcagcctctgccccctgggttcaatagatctcagcgtcctgagtagctgggactacaggtgtgcaccaccacacctgaataatttttgtactttttgtagagatagggtttcaccatgttgcccaggtcggtctcaaactcctgggctcaagcaatccatcagccttggcctcccaaagtgctgggattataggcctgagccactgtgcccagtctataatctttttatgttagaatagttttagacttatacaaaagttgtaaagataatataaaggttttctgtataccctccactctgttgtcctgattattaacatcttactttagtatggtacattttgtcacaattcagaaaccaatgttgatagacaatgatcacctgaagtccatctatattcaaatttcttcatttttttacctaataccctttttctaccccagggtcacatccaggatgccacgttatatttagtcattatgtcttctttggctcctcttggctgtggcagtttctcagactttccttgtttttgataaccttgtaagttttgaggcatattggtcaggtattgtatagaatgtttcttaatttaatttctctcatgattataccgggtgatgggtttttgggaggaagtctgttaccagcagagaatccacctgggtcttcagcaaacttgattcttgtttccttggaggaaagaattcagctgacggccagaagtaggtataaggcagagggagggactgaggccagtcttagagcagaagtgagtaaacgtttattcaaaagttttagagcaggagtgaaaggaagcaaagtactcttggaagagggccaagtaggcaacttgagagttctcagtgtcctgttcagccctggacttggggttttatacattggcatggttccagggtctgtgttttttttctcccctgattcttcccttggggtgggctatgcacatgcacagtggcctgtcagcactttggaggggccacatgcacagtgtgtttactgaagttgtacgtgtgctcactcgaggcatttttcccttaccagtccatggttcctggagaaaagtcatatttcatttaaatcctcttagtgcacatgcttgagcctgctcacccaacttctgagatcttatcaggaagctgctgattaccagcttcaggtgtttccttcctatctattgggagactgcctttccctggtaccagctctgaccaactattaatttagagagacagtttaagaaccacctgatcatcacctaatggtcacctgacattcctggaagcgggcggggggtggggggggggcatctcctgcactggtcttgtctgcctaactacctaccctaacaagaccacagagataaagtgtccatcacatcatataaaggattcctgctaccatcatgatttatcactgataatattgagtttgaaccaatgacaaggtagtatttgtcaggtttctccgctaaaaagttactctcctgctgtcttctctctatactttactctttaaaagaaaatgtctaagcacagcccatgcttaaggggtagggagttatattccacctttttgaggggaaagtatctgtacaaattgatattcttctgtatgtgaaatgtgtctattccaccccccatttctttatatatgcaatcattttgttatatcagtatgaactcaagaaattttgtgcttcacttttggttataatccaaagtcttagtctgtttaggctactgtaatagaataccatagactaggtggcttaaaaacaacagaaatctatttcttagagttctggaggccaggaagccccagatcaatgtgccagcagatttgatgtgtggtgggggcccacttcttggttcatagatggccatcttctcactgtgttctcacatagaagaagaaccgagggagctctctggatcttttttaaaaaggcactgatcccattcatgagggctccactttcataacctaataaccttccaaaagcttcacctccaaataacatcacacagggaattaggtttcaacatatgaattttgggaggacacaaaaattcagtctattgcatttagtaccaaatttttaaaaatcaaattatgacaactttgtctgttgagagctcttttagtttactcttacacttgagtttactcttttagtttaccctcatattcctttgacatatcaattttttttagtccttccttactttctggcattgcaagatgcttcaggcttctcttgtacattcctttcccccaaaattagccatttagatctgggcatcaggtatggaagtatttttattttctccattttatatataaggaaactgaagcttagaatggtaaagtaatctgcccaaggtcatgccttagaaaactgtaggatccacataaaactcagatctgtctgttgttataactgtggcatgattgcttgcctttttttcctttgggggcatcagtctgctttccaatgaactttaagtggtgctggaagttttcctggtctgttgacatatattgtatttcagcattccttttcttactgtccctgagatcagattttggtagggtttaagacaatggcactttagttagtagttctaatctaaaataagtatcttcagaggtagtgctaaggtctgaaagcgatttttccgtgttttgagaaatctaatggaaatcatatgtttatccatgacacaactgcccagactaaggagaatgtcacatttctttgattctatatcaactcaatgtgtctggctacatcagttatttcaaaccattagaagctctgattggttgatgatgatgtcatagaaatttctgaagttgggaaggataataaagagtctttgggggtggaaatgctgggaaaggccacactgattactgttctgcttgtgatccaactctaattgaggaggacccattatgagagttgtctgtgtgtatggcagggaaagagtaacttttttggatataaagtagacatctatatatttggtttatgttttaccaatttgctgtaatgttttaatgttcaaaattctggtccaagttactttaatttctgcttcgttttagatgcctgcttaaaatatttaaagtgtacacattggaatgatttttttgtattctattttctgaaggaaaaatctatatcttagtatagataagcatatggatctatttaatatgttcaaaagcaatgcatatgaatgactcagagcttaaatttgtggtgcttggatgaattgcttgttgggatggactcagaaaggtgggaggagaaagggggagggatgaacaacaacttaaatgggagaggagaaacatgtgattctagaaaacaaaagaatcatgagcaccaggaaaagataagtggttgtgacagaaggaaagttctcagtgaatattaacagggcctaacttcatgttacacacaattgtgttcacatgaagccatatgaggaaactgcaattaaaatgtttagaaacagaaaatgttgtttgaaagaaacctttgcgatcatctaatattgcagttcttgatccaaagctacacactatgatcactggagaagcttttaaacaatgcaatgtccaggccccaacccttaagtttctgatttaattggtctctgatacagccccagcatgaaaaattttaaaaacttccttgtaattctaatatacatccaggcttgaaaccattgatctagttattcctgttttttaattacaagacatgtcatatacacaaatagtgaaaatgtattttaaaactatgtatttactacctagattgaacacataaacttattgccacatttgttttatttttattttttaagaaatacaatgtcacagatatccttagacttcctcatccactatcaaatcccactgcctctcctccgtttccagaggcaattgctatctagaagttggtcatatcctccccattcataatttttatatgtttactatgtaggtatatagacttttgatggttttaaggttttgtacactgagtatcatagcacatgtattcttttgcatttttccctccttcccttccctctctccctcccttccctccttactttctctctctctctctttctctctctctctctctttttctttctctcttttttctccctctctctttctctctccttccttccttccttccttccttccttccttccttccttccttccttccttccttccttctttctttctctttttgaaaaggtctcattctgtggcgtcatcacagctgactgcagcctcaacctcccaggctcaattaatcctcccaccccagcctcctccatgtagctgggactacaggtgcataccaccacacctggctgcatttttcttttcttactgaacattatgcttttgcaactcatccttgtaattcaagctattaatattaactgtagtatcctataatacttttatgcattcccttactgatgggcatctaagttgtttttctcattttgttttgcttggcttttggtatgataaaaatactgtggtacacatttttgtacatcttcttgagcacacagaaataagcttctctagggcagagcttatatacaattctgtatagcagtgcctcacagttgggtagaagaagtgggacctgaggtgaccacagccccctaaatgggcacctcctgctatgagcagcctcctcggcttaccccactgtgctctatgagtattatctttctctatgtgtgtcataatggggaaattggaaaatactgccccaagaaataacctagaagtggccatcctgtgtcgtagagtaagcacacttaattaactctgtaagtattgctaaaatattctaagaattattgtaccaatccccatgcctaccttgtcagactggaaaattttttgctggtctgatagatgtgaaatgatatcttgtcttaatttgcattttcctaataagttagaaagtcttttcatatgtttactggcatatgtttatagcttatgaatcctcaatttctatcctttgctcatttttccattgagttgtttgtttcttcttctcactgatttttaatgactgtatgtattctggatgctaatattgtgtaggttatatgcattgcaaatattttactccaatacctggcttacatttaactttattttagaatcacttttctcaaaagcttttaatttttagttatgtttcaagtggagaaatgtgaggctcatggttgcatagtaataatattttagtaccaaatgatgtcaccgtgcttgctactctaaagcagtacagcaagattgaaaagaacactcgtctgaacccaagatttcacaggtcttctatatctgcttctaatagttactggcaaaagccagtataaaaaataatttgttgatgttggttacttaattacctgattaaactgacacacagtgatgaacagttagtcacctaaccccaagtcatacacctttttagtgccaaagctgtcagaatctcacaccatttcccaaagtttgctgtgtggaaccctagtccttgaaaagcattctgtggtcagtttcattttacattttttctcctcttaaaatttcagagtttacagtgtgatattaaaagttctgttaagtcttgcaattaaaaatgcaaccgactttcctttaatgagcattttctaaacatatttgtctgtggaaccctcctttgctatggagcacctaataacacaccaaggagctgatattctatggaatggactttgagaatttctacatttaaaaatattcccctccagtctccaaggctgtcttcccctgggctggtactttgtctatacaatctaataaatatataaaaatagaagcactaacattcatcatactgaactttaaacactggcatatagtaaagagattccactggcttaaagcagaaataataacactgattgattttgtcccctaagaggctctcatgagttcctctgtgagaatgcatgataaaaatatttctcccccctttatgagcatctcttaaataatgtgggaattattgtggtgcttggtattatgatcaattcttgggtcctgtagcgtaagatagtgctcttcagaagggtgtgtcactcacctgaggacctggagtcctaaggcaggagacaggaccttcgaagttggacttttgctaggggcagagtttcttgatggactctgttcttttgggttcagaatttaagaaactaactcatccaagcatatgctcctaagttgtgggtactaagatatttgggaacttaggctttcaagctctggagagcaaggtatccttatgagtcaggagtaggagggagatgtttgctacatatattatgctacatttaaattttggacaagtgtatgtaatatatactcaaaaacctaatgaaattattaatgaatgactagatttcatctaatgattcagcacatttatcaaaattccaccgtgtcaccgagtgtggtggctcatgtctgtaattccagcactttgggaggccaaggtgggtagatcacctgaggtcaggagtttgagaccagcctggaaaacatggcgaaaccctgtctctactgaacatacaaaaattagctgggtgccgtggaacatgcctgtaatcctaactactcaaaaggctgagacaggagaatcacttgaacccgggaaatggaggtttcagtgagctgagattgcaccactgcactccagcctgggaaacagagaaacactctgtttcaaaaaaaaaaaaaaaagattccactgtgtctctgatcccatattagaaatgatgacaaccataaaagtagaaaatacctgtgaagaagtgatttataaaagattacaaatatataaattgtgctcatgctcagaaaaatggcaagaaggctgtatacctaaatgttaactgtggtggtctctgagttgctaggaatattggtgggtttttttccttccttctaagtaagaattgtctgtgttattcatattaacatatgcgacatttcaaatgctttttaaaagttaattttatgtttagatgtataagaaaaatatttgtatgtaggtatgccaggtgcagagataattttacaaataatatgtgttttgcaaaggcctcccaaccccctctgtatgatggctgtatcatctataataactggccacaaattttcactttaatagttagaagaaggcagtttgaaagttagtgatatccacaaggtttgtaaatagatggactgtggggcttgggtcccaagtttgccagttactatgcggcctgatcttggttaagttccttagcctctctgaactttagtttcctcatcggctgagtgggtgaaataatgacacaaacccccacaggagttttgtgaggatgagataagaatccatcaaagccctgagcccagtggctagcacatagtgagccctgaggattgttagctcttgctaggagtttgagtccaagaactttagctaagttggagcgaatgcctcatatttgatacagacaaatcagcaagcctatgtacttacagaggctacttacctgaaaatcaagatgtgaactggctttggagagtgaagtactgtaaaatactcaagagaagggttaacatttttttttctacagtaagatttaggaaaaagagaaggtgaaaatcaatcaaacaatcttggatgcaaggtgtagtgtgacctgtgggaaggagataaatgcaaggactgtaaagctactgatcagacaaaacgaaaagggtatgaaagagagggtttgataccaggccatgaatagaatttcaggaaaatgaatgatggtatgggattaccatgttataaatcaatgaggtgactgagatcatatcatcaaccagaagaacaaaattcaaatagatattaatgacacctgaccttggatattaaccttcaacgtagtcatttgtaatgtaaaatccctggttggacaatctactctattaccatatggttctttttttgagaggaggaagtagcaaggatcaggtttggaaaggagaaaaataaaagcaatttaaaacaggacatttgggctttgaaggcaaaggggtttggaaaggttcgaaagtgctgaggctgagctatcaagtatcatggtggtgtcaggtttgttttctgggaaatatttgaactaattttatcgcagcatttctctcaggctgtttactacctgaatatttgtcaaggcctctagaggagagagccaaatatgtacatctgaaattctttctatttggagcacaacttgggtggggaaggctctcttgtaacaggggtggggagctgacagtagatgttgctgcgagaaagatgagatttcgggagctgtcatcaggattgcgacttctggttgcagtcgatatttttccaaatgccaaccacacaaggatttaaaagaaggtgcaaagaagcatgtggcgtgctcctcatgaagcaagagcgggctaagtggctcgcttaagcatcacgccccccagccaatcacgagcctgggcaccccggccttttctctgcaaggccttggccacatgccctcctatacaattgtgaggagattggatgaaacacgatggtatttaaagcgctcttccatggcgctcttgcagttgtaagatttcccaagaggcagttgccaagattatgttctttcccactgacttttaatttgtaaattgtaatgggctcccctttagatatggcgatatagtttgcattccacaaggtggccagagaagagatgatcccatgtaaatcttcagagtacgctctctgccatgatgaaaggtgcaggaaaacacaaagtgatcaaattctcttatggtcgggcatgatgcttgcagaaactctggtcttaaaagagatctgttatcaactatgttcttaacagaacttgaaaaagaatcacataattttgcttaaaagtaaaccacccttataaaggaagaggaaacaaatcaaccactggaccatgtttctctttatatttttacccacactcatcatgcaaaccatgctggcaggtttcccagattcttagcaccgccttgacactcttttctctcctcctggtgtaacagccctatttgaattattaattctagaatacctccttcctttcaacccaggaggcaaacagatccaccctttctgggcaccaaaaatataatcaatagtgtactaggatatacctgtatttcagtatctgggccctcaaacaaggagtttaatttgagagttactcaataactgtcctatgaataaagctgtaaacagactaactaagcagttaaacttcacatattagataatttgcagctatttctcattgaatttgctaccgagctttctttattaaactgtaggtaagagtttcaaagacagagtgaacctattacctttcattttcaattttttgtcatattcctttggcctaataatccttctcttaagagttccacactggttttattgaggccaaggataagctgatattagttagctacttctctccaaattgtgctgtattctgttgggaggcttccagatacccagcctgagaaactcaatattcaagacatctagtatcaccaggatggttttttctgcaaaagcttctaccatcccttgctttatttgcttgctttttcttcctggactttcattctctatgtgttgcatttttctagtagtgcagctacagttcatttattccaatcatctttcttgatgtgtaatagtcccttgggtgaatatatgactttttttggttatcctattgatagacacatgttggttgcatttgggggctgttacaaacagtgctgctaggagcttccttgcacacgtaacctgctaccctcgtgcaagagcttattgaggatttttactgagggtgtgcctgtcttactagataatgccaaactattttccaaaatggtagttccaaacaattccctattgagccaggctgcatgtcaggctctgagctggccctgtggccagcaaaatatagtcacctctctcccctgacactgcaacagtacttacttatattctactgggaagagtggatcggtcatcttccaaataaataagaaccacaaatggacagactcctatctccctctctctccctctctctctctctctctcatcactttctgcctccctggtgccgtcaacaattgtacagaagctgcacattccttgctgtgttctcaaacatgagctagttattcatccactcgtcaagaagcctcttctttgcttcgaaaagaattgccttccagagggtatctccaagactttataacttttttaggaagctaactcaacaattcagctagtagtgactgggtacctactagaggccagttgcctttttgtctgccctcagggaccttagattttaatgggagagacaagctagtcgaaagcaaactacaagggcctattttaacttccctcttaaaaaacaaaccaacaaacaaattctcaggtttttagcattttttccagctaagccagacctgaaaggctggtgctttatgcaaacatcttggtaccactctcttagttgccctctgtaagggacttgaattaggagcactcaaaacgtttcacccttattcattcattcaaccgatatttttgtgagtggctgctatgtgcaaggcacggttctggtaccctgccctttcagagcttacattctagtaaacgtgaatttccactgggttctttcattgcttctccagatactgttcttgcctgatgttgccttaattgccccaaatcccaattatattattggcctgtcctaggccgtaggtaaaaaaatttcttcttccacacagtgcacacttgctcttagtcacaaaatgacaccagctgcctggatgtatttgcatcatgtatgtctatgacttccttagaattcccagacattggtccaaagtaatgataattactatttaaaaaatcgttacagtttagaaaatgcttttcaggcaagtgtggtggctcacacctgtaatcctagcactttgggaggctgagacaaccagatcacttgagcccaggagttcaagaccaacctaggcaacatggtaaaaccccgtctctacaaaaattaaaaaattagctgggcatggtggcatatgcctatggtctcagctcttcaggaggctgaggtgggaggattgcttgagcccaggaggtggaggttgcaataagccaagactgcaccactgcactccagcctgggcgacagagggagactctgtctcaaaaagaaaaaagaaaaagaaagaaacacaagaaaatgctttttgcatccatgatggtgtacagattcacaccaaatacagaaggtatacaaataggcattattataattatctttttttttttttttttttttttgagacggagtctcgctctgttgcccaggctggagtgcagtggcgcgatctcggctcactgcaacatttgcctcccggaacaggaaatcagatgaacaatgaaggaggaaaatttaaggttagggaacaggggcctccactcagtatggaggagatctgagtgctggaagaacagatgaggtgaattagtgacagcacctagcttctaccacctttagttcgaatccctgcttggccccttcctggttgtgtggctttgtgcagtcactgagactctttttagaagaaacagggatggcaatagctcctctgcagagtgattgtgtggatgagagatcatgtataaaaagcaccatgctcctggtcattgctactctccaaaatagtttaatgtgctggcataaggatagaggcggggggtgtccaggcaagataagaacaacattttttttggatttattagacagctgcttcctgtaatttgttatcataaatgaagagcttgctctaatcatttcccatgtatactcagtgttcttgactctaggaggattatgtgacttccttgttttctatatggataaattcggaattgatgcaaagtgaatgaagacatttccctttagttttaacctgtgccgatacatttttctatttacatcaccattttattgggccaaattctggtgaaagtattaggcaagcatcagtcctagtttgtttttacattttgcctttagccctcagctctgaattccccttttgtaaaccccttcatcacctcagtgattgtggttgaactggctttcccttgcttccatggagcttctcatggtggaagacccagaagcattgcagaccttggtaaaagggagtttttgtggtgctgcctgtcattcagaattttccactaacttgtagtagcagcagaggtgagtctatttattggattgagtccattattttaaatgtgtttagaaaattgtatattatttgaataagaagtaatggcagaagccagaaatattcctatatcctgttcccaaagggtcaaatgagactttgttttcttcaattaaaaaaaaaaaatctgactgggtgcggtggctcacacctgtaatcccagtactttgggaggctgaagtgggcggatcacctgaggtcaggagttcgagaccagcctggccaacatggtgaaaccccgtctctactaaaaatacaaaaactagctgggtgtggtggcaggcacctgtaattccagctactcgggaggctgaggtaggagaattgcttgaacccgggaggcggaggttgcagtgagccaagattatgccattgcactccagcctgggcgacaagagcaaaactccatctccaaaaataaataaataaataaataaaatctgataacctaagaagaaaaagaaggaaattctgcagtgtgattgtaaattaagctctcttgtaaccctctcatgcagagccaaagtgacgatataataccacagtgacataaggactttgagatccttatgagtcaggttatttacaaaacattattcttattttcgttaaaatagcgagtaagtgggggaattttcacctgcattcggatcttacagcacaccacaaatagtcttttatgtctcagctggtgaaaccataaagaggttgttattttacacagcagcttttcacagaaacataattcaattttaagaaaatgaatatgaagtaaaatacctgttcctgctctttcaatagctctgtctttccactcccactcctgctcagtcaagcttcctttatccttccctaaaaggcctcaggagtttcaggttgtctcagcaaacaattgtcattcattgtttggtattagaaacagagtcatgaagggacgatatggggtgaagtaataaatgtagaaagagagatacaccagatggtaagatatgctgagaggtgattggttataagttctgagccctctctttgaggtaattccatcatcaacaggttgtgaatacctgtgaactctgcttgtgtaatacagatagcaacaatgcgtgcctctctatcatctcaaatgcctttcttctttgttaattgtgggaggcttccatccttctcaatgttactgaactttaaaaatttttcacatcaaaaccaaggtcaaatcaaatcagaagtacaaggtgctgctgtgttttcaaactacaccctgatttatctcttctgtagggccggagggtgggcagggatgggataggtccctccaggtaacaatcacggtcctatgcttacctcatttttttcttcttaagtggctgtaccatgacccatttttgcagatgatgcctgttcacctaaacaaaccctaatcaataacattttgtgctgtgtaagaataaagtaattggggctgggtgtggtggctcacgcctgtaatcccaacactttgggaggcccatgcgggtggattgcaaggtcaggagattgagtccatcctggccgatatggtgaaaccccgtctctactaaaaatacaaaaactagctgggcgtggtggcgcgtgcctatagtcccagctactcaggaggctgaggcaggagaatcgcttgaacccgggaggcggaggttgcagtgagccaaaattgcgccactgcactccagcctggtgacagagcgagactccatctcaaaacaaaaaaagaacgaaagaaagaaaagaataaagtagttggaaggagggatgtgaaaataataagtaatataaatagctgcatttattgagccctacatatgaaccagatattgagcctaaatatgaaccagataaatctctcacgtgcattcctttatgaaatgtttataataccattctgaagcaattattattccctttggaaagcagaggaaactgaggaaaacagtagttaattaacttaatcagatcatgccactcataaaaatgtgagccaatgtctcatccagacaagcccccaccctcagctggtgtggagcacctttgtaatcctttcagctgatcctagctagttaatctgtccattagttactactagagtgatcactactagagtgatcacagatttgtcatccaaactgggaccactttgaggatgaaagtggggactattaaaaactatcataggaaaataggcgtaagtggggattgtcttagggaaattcagaagttctttttaaattattttcttttattcaggctttcacctccgcttcttcccaaagaaaagaagagagaagtttcaaaggatatctataacccagtctacatttggggcctgggcacagctagctattaggtcaatagagttccaggtcaatccacccttttccttcctcttaaaattttcctttataagccctaggctgctataaccttcacaataaaatattgaaacaaaatgctccgtctttcaaaaatacagtattctcttcccctaccaaaagcttctactttaacagagtcttttcttttaatgtactgggtataggtgctgatgaaaagcattctccaggccaggcacggtggctcttgcctgtaatcctagcactttgggagactgaggcaggagatgacttgaggtcaggaatagagacaagcatagacaatagagcaagaccccatttctaggaaaaataaaagaaaaaatagccaggtgtggtggtgtgcacttgtagtcctggctactcagaaggctgaggcgtaaggattaatccaggagtttgaggctggagtgagctttgatcatcccattgcaccccagtcttgggaacagagtgagactctgtctttaaatggcacataataatacacacactacatgctcatttgggtgaaacaaaagaatttttatatatttgcattgtgggtatgtgtatgtgtgttaacacttgtgtatacttaagcatgcagagtatatctcttcaataatacccacaaaccgtttacttattattgcttcatggagggaaagaatctcagaatttggggtgaaaggtgatttattttatacagtatatctttttggtcagattgaaattttggccttgagtatattttatttctcaaatgagaagaaaaactagacagataaacaccttccatgcagtgaagttgtatcattgtaggaaggcaatctgattaaagtaagtgacacagatttttgaatgagtaataactttctctctttttttaaaaaaaatggcacttttaagccaggcgcagtggctcatgcctgtaatcccagcaccttgggaggctgaggtgagcggatcacctgaggtcaggaatttgagatcagcctggccaacatggtgaaaccctgtctctacccaaaaatataaaaatcagctgggcgtggtagcttccatctgtaatcccagctactggggaggttgacggaggagaatcacttgaacctgggaggcggaggttgcaatgagcagagatcatgccactgcactccaccctgaacgacagagtgaaaccctgtatcaaaaaaaaaaaaaaaatgacacttttagaagtgctctttaaccagtggaatgttaagcagtatgaaagagagaagtgaagatattcaagcagtgaagatatttgagggtacagtggtcatccctgcaggaaatagtgtcttctaagttgaagctactctttactatttcttccttttttcatttataagcccacaaatattccaaaatgttaacttttttaaaaattatgtttaaaacatgattgtaagctccaacagtaatgtggaattttctgctctttagttatgcacacaaaaagttccatagcttaaactgaacatggtggcatccctgtagtcccagccatttgggaggctgaagtgggaggatcacttgagcccaggagtttaagactgtagtgtgctatggtcatgcctgtgcatagccactgccctccagcctggacaacttagcaagacccatctctttttttaaaaagttccatagcttaaactactcaaatgaagaaacaatcagtgatgtgtgaaagtatttattttggccatgtactctgagataatgcacagcagactgggttctcaagctagtgccttaaacaccacataattcaaacggaagcagtgaataagccttggatgatgtatcagctctaaggatgttatatgtgagtatgacaaggacttttaatttcccatcccatacttgctcttctgttattactagtaacagaactctgacttcatttgggacagtaatttttcctcttaaaagattcccttaccaggttcccttgcagctaagtgtggccgtgtgtcaaaggtctgaccaatgagctgtaagtgaaaatgttcccaggtttttcttttttttttttgagatggagtttttgctctttttgcccaggctagagtgcagtggtgcaatctcagctcactgcaacctccaccttccggtttcaagcgattcttctgcctcggcctcccaagtcgctgggattgcaggtgcccacctccacgcccagataatttgtttgtatttttagtagagacggggtttcaccatgttggtcaggctggtctcgaactgctgaccttgtgatccacccaccttggcctcccaaagtgctgggattacaggcatgagccactgcacctggccctgtccccaggtacttctggagaagctccttaaaaggaactaactaagctaggaggggttctcattttgccttcctcttttcctttttcatgattggagagaataaatgataactagagggatatcatggcctaagactggaagagcagagagatagaaagagcctagggctctgatgactctgaggaaccactatatgagccctgtgcatccagaggtagagtttctcttatgttgggaataagtcttggatgtttaagacattgaagtctggtctctgttactgccagttaaatacaaatccttactgaacaaactacttctctcctttgggaggaagcatagcatgtaataaaataaacgtgacattcattcatcatcattcctaaactatgccttttgctatgcctgctttttgttttgtttttaattaattcctttatttatttatttatttatttattttgagacagagtctagctctgttgcccaggctggagtgcagtggcgcaatcttgtctcactgcaacctctgcctccctgattcaagtgattttcctgcctcagcttcctgagtaactggatctacaagcacatgccaccattgctgtgtaatttttgtatttttagtagagacagggtttcaccatgttggccaggctggtctcgaactcccgaccgcaagtgatccacccgcttcagcctcacaaagtgctgggactacaggcgtgagcctctgtgcctggctttgtttttaattaattcaatttttaaaagacatttcttcttttagagcaactcctgagctgagacttcagctgcttgtactctaaaaaagtttctctcctttgtaaacaacccatttctcaactcacagaaacctcaattaataatcatttttctcacaagatgactctaggggacatttactgagatactatgactgtcaccattgctgctggtactgaagtaacagacacagatgaacttttctcacttattttccatgtggggtgtcccatttaaaataactccattatgtgtccccaggccctaaatgtagactgggttatagatatcctttgaaacttctctcttcttttctttgggaaggaggggaggcaaaagcctgaataaaagaaaataatttaaaaagaaagaaaggaaagaagaaacaaaataagaaccgtatttttaacaaaaggatttttgaaagccttggaaaatgttatattcactcatataaggccccactgttttaaaacatattttactataattttgccttcaaaaccctgacattcgaagttgaacagggctctttcagtgtacaaccccaggacatggagaaataaaaagaacagtattccaactaacgcatactcagtgggaatcatcacatcgcataattgcttgaaatccacaagctgatccgatgtcatcttcagaaatatgcaagtttccctttgttttctgacttagagatatttccttgctttagggcttaacccttcagttgctgcccctggtgattgaaacataattaaaatgaatgtggatctgcccttcctaaactctccccaaatgttagataagattcccccaaacctgccaaatcttattccaacaaaaacacaaaatatgaacttcaggtgttccttttcactcattttctttatctacctgtttctaaacaccacacacacacacacacacacacacacacacacacactcatgtggacacacacagccctttaaatgtctttctacaagaaactgtaaaagaacaaagagttgccattttggagcatgtaatgacatatttaaaagttcatcaacttccccctttaaaaaaaaacctggcaatgagtctaaaacaataattcaaaaagatttagagaaaagaatccttaagacttattcctctgtaacatgatgtaaatcataaatataccactggtctggaagtgattacaacaggctataagacaaaagatattcctaagcagacactgctggcaatgggctctatactcccatctgcatataagaggatttgggaaggtaagttctcataaatgctaataagagattcacaccactgtaaaaagaattcccaggtgtacatgttccaacaataaattgttaggtcctgggccacagctgattgcataaccctttacagaaatctgtcctcttattcaaggtgaatgaatcttttggtgttccaagcattcccaccacccttctccagtgttccctttgcttcttgattgtcattgtccctgaccttcctaacaggatccctggaatgaagaggaggaaacgctatataaacagctcattctagaagtgtgagtcattctggaatcagtccccaccccccaccaccgttccctgtataagggatgcttgctcatatctaagcttctcagttgctgttagaaagcatttctttgttttgtctttccctatacctttttcctgagggcaaaggtttaactttttttattcttctctgagtgattcaacacttgagttagaggttcagttcacaggacatcaagaattacattttgcttgatagcatagcattagaagctacagccagccaactcaaagggacactgcaatgccattttataattaagcagggcacccgctggaccacatgttataacagatgtttcctggccccaggtactaagccagcacacagtaaaaccgcccagagcctctccctgagccaagatgggtcagtgtctggaacaactcctgtctagtgtctcttactgtaattagagaataaggctagcttttggtcattaattccatttgaaaaatagccacagctaaatgaaaaatgaaaaaaagaaaaagaacatcaaagtgcttttaaaattgaaaagcttgataagaaaacagagataatttattggtgatttattatttcgatcagtggtttagatcttatataaattctgtataatgccctctcttcaacatgttttgcaaaattttcactccatttataaaatggataaaattagaggctccttatgcttaagctggaagagagttttaggttggttagtaccaggaaatcaaactcagatgtttatagaggccagttcataaatgaacaaagcaagccagagcacgaaaaatcgttctgctttttttttctatttttatttcattttcttgttttcaataagagccatgggtatggaaatatctatctccactttgaaaaaaaaaacagttttggcagggctgacattcagatggtgcgcacctgagattgggatggtccttaccaactcatgtagagatggtgctctaagctcaccgagtgaggctcatcctcagcttctcttccaagagttcttggacctccccatgaccaattggagcagagtggggagcatccaggagctgctctagcacaaaagtcagtgtccattccaatcagtcagttcccattccttcgtagttaaatatttttaatattgctgagaacaagtacattgacaaatagcagttggtattttgtctctgtttagggcaaaccaaaagggcaataggaattgatggagtcactggagccctggagagccccttccctgttaaagggggtagctactaccaaatgaataggaatggccactcctgtggccagatcttctgatttctcaagggaaagtaaaaacctatgttcttatgtaaagtttcccaactaaattatcaactcatttaaatactgttacaggcaaactaagtgtttctgtgggccaaatgtagcctaggtgttcccaatttgcaaccttttttatttctgagacataggagaggactaaagtctaagtgacttgcccagagatcacccaagtaactagtggcagaaccagaatgagatcctatagcccctgactccccagccagtgagatctgaccttcttcaaaacaaatcctataataccactgaaaacgcttcaacaaggatttctagactgcctaccctaagaagaaggaacttagattatttttagtattacagttctttatactagtgttttctcctacaacataaaagtaaaacctcatgtccaaagctaacatataatgatggaaaagatatgaaaagttccagagatgactgaggccttgcatagctataagaaaaggttggtcctctggcaggttggacatatagttggtgtgtgtgtgtttttgtttgtttgtttgtttgtttgttttgttttggtttggtttttttgagacagggtctcgctctatcacccaggctggagtgcagtggcacaatctcagctcactgcaacctctgcttcctgggttcaagtgattctcctgcctcagcctcctgaatagctgggattacaggtgcccaccatcatgcccggctaatttttgtattttttgtagagatggggtttcgccacgttggccaggctggtcttgaactcccgacctcaagtgatccacccgcctcggcctcccaaactgctggaattacaggcatgagccactgtgcccagcctggacattagcatttaaacaaagaaattgatagcatttccagaagagcaggggtcaaaaaagccctatggcaaaggtgacccataacagggtaagaaagtctccaagtctgaaggaacctcactattaggagggatctgatttttatggagttccagtgtcgtgtgatcctgagatgaatctgttctttacatggttatttcttacctttgttatggaaccaggttgtgcctacagtgaagtcaagtgtttataaagtagatatgttcacaaatttaacacatatttacactgtgggctagaccagcattctcaaacatctgttattatcccaccttctacgtgatttggcttcctcttatcatttacactcttattcctttaatttttaaaaagccaatgtacaattttttcttgactaaaaaaaacagttaactacccttgtgttggggttggggttacatcaatgaattaagtagtccttgaccttatggctccatagaccattaatatacaaataactaactttgataaaaatattggaagtgctatgataaatgcgaagagggagccattaattgtccttgagtccgatgggggtaagagtggaaaagcttcacccaggatgtgatattgagctaggctttcaggaatgagccagtaaggaggtgaaggttattctaggcagagaaagctgcttgaagggaggcacaaagtcgtaaaatgtactgggtgtttggagatggcgaatggttcaaaatagctaaagccaagaacatacaaggtgagtgacaggaaaagctgcctgggattggttttaagtatagtcatacacagtaggacataaccttgtcttaccctgggggtaaagagatagcccccaaagttttcagagatggagaatgtctgatctgctctaggttatgagagtctaattttacctacagtgggctggtgatggaagggactgaaagtaagaaggtcaattaggaagctgtccaaatatatcaggccaaagatggtgaagtactgaattaaggagtagaagctgtgatgaaaaggaaaagctagatttgaaaaccttttttgaggtagaaacaataaaacgtggtgactaattaggagaaaagaaggagtagaagttgggtccaaaatctctaacttgagtgccagatatatggaaatgccatctatcaagacatgagggaaagcagagctttgggagggtgtgtgtggggaagggagaggtggggctgattgaggagttctggcttggagatgttaaagctgaagcaccttctgaagactctggtaggtagatctacccagaaggcatcaacaacatggaaccatggctccagaaggaagaactgttggctatgagatggacccctgtggaaatactctgcaaatgacttttaatgatacagatggaaactaattatcctgagaagcctaacccgatgataattagataatttgaaaactggtagtaaaagaaggcacagaacagcccttcgaccagcttccacatcatcttctttaatacaataagattgggaaatcactgtgcttgaaatgatgcagacacaagtctgaacgctgatcgtcatactactagctagctgtttgaccttggacgagttactgtttaacctcgcttagctgctttgaggcagacattattctggggtctgggaatataatgataaataaaccctaccctcaaagagcttaaatttccttttctgtaaaactactagattgcaatgagatattatgtatcaggcacagtgcatgatacacagtaccaaaaacctgtcacttactatatgtgccaatcactttctattcttggttcatttaatttttacaccaaacctgtgaggtaggcattgatattgtccctatatagttgggaaaactgagctcaggtaccttgcacaagttcacgggaacaataagggtcatctgactcccaaaatgctatactacatctcctttcctttgtcaaactaaatgagctatgcagacataagcaccttctctctctgaaagcaccaaaatatgagggaatggagtagaagacatcatccaaagaagatgccagttaaattgagataatatggcatattaacatgaagataatcaaaactgaagttagtcaagatagcactggtataaatctctttaaatgttattcagatgactgaaccaaagataatggtcgagaaatgcttatcagttcaagatggccaaggctgccactctgtaccactccaaggagttgtgtgtgcagttgcaccgtaaccagtctgcctggtgaaacacggtggccctgtccgtagctacagagttcttttcctacctcacatcatttttggaagtaagtgcagaaaaatatttattagtaagtaaacaacttttaaaagcatttcaggagtaatttttactcataaataatgaaatacaaactacttaaagtcattctggggtggaaatctttaccatattactacctctttatgtctgcttcttggctgtcatcttaaatcttcctcttcattccctcaacattggcctagttcaagctctcttcatttctctcaggacagcatccagccacttgtttccctctgtctctcttttttttttttttaatcttactttacttactttacacgtaagatacatgtgcagaacgtgcaggttttgtacataggtatacatgtcccaagtttggtacatgtgccatggtgtacataggtgtacataagtgtacatgtgccatgtttggtacctgggatacatgtgcagaacgtgcaggtttgttacataggtatacacgtgccatggaggtttgctgcacccatcaacctgtcatctacattaggtatttctcctaatgctatccctcccttagcccctcaccccctgacaggccccggtgtgtgatgttcccctccgtgtgtccatgtgttcccattgttcaactccctcttatgagtgagaacgtgcggtgtttggttttctgttcctgtgttagtctgctgagaatgatggtttccagcttcatccatgtccctgcaaaggacatgaactcattcttttttatggctgcatagtattccatggtgtatatgtgccacattttctttatccagtctatcattgatgggcatttgggttgcttccaagtctttgccctctcatgtatcaattgctctaaggcttaaaccccctcagcatttccctatcaacgaaaatacacacccatattcatggaggaacacaggttgcttacaaccttttgaccctcattcccaattcacaacttcttagatctcagatgtgcccttctgtttcacacctctgatccctctgcacttactagtccctctgcttggcatgtcttccccaggatcacctgatgaacccctactcatcttgaaacacacagctcaagagacatctcatctgaaaagcctttcctagcctttccatatttagtctttgtacccacacaagactctgagttcactatggaaactgtcacaattaataatgtttccttgttaacatgtttgtctcccctagtagacctgacactccttgaaagaatgcacattatcttctatagttttgcattcccatacccaagtagagcacctgcatagggtaggggcccagtaaatactgttgcactgagtagaattgaatccaatgtcattatcatggtcatcaactcagggttagtggactcttacaggagtataatttgttgataagtgttacatttagcgtttagagtggtggaaggagagacagccaaaactcttgttgattctgatgcaaagaaaacagggccctctgaagtaggaggtaaagaagaaaagctggaggtgcctgaaatgtgttcatttcatcactcttcagtgcaagagattggaatttcagtgcaggccaagccacttgtcctagagggttctgacagattttttgggaaaaaaatttaaaaagaataaaattcatccaggcacggtggctcatgcctgtaatcccaacactttgggaggccgaggcaggcacatcaagaggtcaggagttcgagaccagcctggccaacatggtgaaacccatctctactaaaaatacaaaaaactagccaggtatggtggcacgtgcctgttatcccaactactcgggaggctgcagcaggagaatcatttgaacctggaaggcggaggttgcagtgagctgagatcatgtcactgcactccagcctggttgacagagcaagactctgtctcaagaagaaaaaaaaaaagaataaaattaaaatctgtggtcagaaggttacagaaaggaaagacacacatatccgctagggaataggaagtggtcttgtcttcagcagcaggactgtctaataaatctggagagttttattgacttcataggcgcaaaaataaccacccggagaagacatcgggtttcacttattttttggaaagtaatttttcacagacgcgaggttaaaagaaagtggttgcacgggcctcggctgtggtggtgtgtcttctggtatgcgtaatgcaactggatctcaattctgggacgatgcccagattcaggggcctaaagcctctgttgaaagcaatgaggacagagtgttgccaaaattttatataatgcaactgtagatcaattgtcttagtgcaagggtagactttgatcaggagcgtctggagggaggggtttcattaaatgctgttttcagcctttaattctaggttttacatctacttgttcctaagtcagctacagactctgaatggccctgacatagagaaactgatccctaagcccacatctggctctcaggcatcagcagtgactggcatggaaggagttcctgggtagaaaagatgtacagtttgggaggttttgctcttactccatagtttttggtctcacgttagatcagtcagaaaggaacacgcttgatactctctccctcctgcctcatgtctgtgattcattagaaaaacttaaaaacttcccctatactaggacaagctttcctaagaaaataattgataagagcatatgtttgttggatgaattcttcctagaacaaacgtctggccaagaatagaaaatccagccagtcttagaaggtataagaatctatttctgaactccttcagatgaactcatcattatggaaaagatggaagctaagtaatatttctaagattttacaactgtcatgcttattcctcctggtctacctgcagggatcttatcccacagggcagggaaaacttttgtactaccatctttcttctacaaatcaacaggaacacagacagaatagccatggtctggccacacttggtggtgagtggagtctcctggggtgtgggaagacacattatcctcagagcctttagcattctcagcaaaattggactggggtccaagaatgagagggtctgaaaacgaccattggactgggaagcaggaaacaaataaaatgtgaaaccattacatctgaaataatcatcttattttagagatgacaaacataaacggtggtctcgaaatttattttttagcagcagaattctgtttcagagcaaaatcttagataaaatagccaacatttactaagtccttggcatgtgcaggacactgggctaagcactttacatgggtagtgttatttaatttaatcttcactactctgaaattggaactattgttaggcctattttacagacaatgaaaatgagaaattaacgtgcctcagaaaacataatacacagcccactatatggcacagatcaaaatggggttgatgtggtggaattgctgttagattaccaagaactcttaaatcaccctgctgtcttgttcctccattaccctctcatctctctgaagcaaccctgaggctttatgtggagcagagtttgataatgtttttactagaaaactcctaaaatttctttttattctaatgcccaattatcctaattctggagaggtaaaccatagtaactgtcaaaacgtgctctttaagactggatattggcaaaccttgctcttccttaaagggctggctcagggtcacttttcacacacctttgaagactagatttttaaaactattttgatccaataaatgtaggaatgaaatcaaagaattgtgcagatataaacattctgatgctgtaagatgaaatgtgttgttatattaaaaagtaaggacccatttctatttctttaataattattaggtattttctcactaacacattttcttatacattcagagacaaattgtttctaataaatccagccagacgctagtattaagcattagaattttcacctctcgcattaactagatgtctgtctgggcagttggctcacccagagcagggagttcatcaaggaaagggagagacttttgatctcttcgttggcttttcacaaagccaacaaacttcacaaagccaaaaaaactccacaggctgaacctgttaactcctaactcacttcagacattcccaaattgcacgattttagggttgctaagagggtggggaaacagacaatttcttacactgtggctgtgagtgtaaatgggtataaaattattggagggcaatttggcaatagctattaaaaatgaaatactcataccctttgacccaataataattcatctcctgggaattcactgtagagaaagactctacaactgctcaaagatgtttaagagtaaaatgatgtttgcaagaatatttgttacaggaaaaactggaaagaactcaaaggtgaattaataggcaattggttaaggagagtatggttcagccatacaatacaatttcatggagctatttaatagaagattaaaaagatgataagtttttaccaactgacatggaaagatgtctaagacatattgctagatagaaaacggcatgcttttgagttgagagtataatcccatttttttgtaaaataagtgaaaagttaatatatgccttgaaaaaattttaactgcttttctcagctgtgtgggattacgggggatttccactttctatgctacatattataaagtttaaagatgtttatgtgtgtacatatacatatatatgtatatgtacacacatatacatgcacatatatatgtatatgtacacacatatacatgccattgctttcgtaatcagaaaaaaataaatgtttctatggctgggtcttcagaaacacctcttaggaaagtatggaagcctagtccaaatccatcaactttactgtaaaacaaaaacttggttgacatcggaacaatgataccgcttaaccaaaaggaggagcacacttggaaacttgtctggtctctagattctataagccattgtaataattagcccacagtagagtgttcttccaaggaggggcaaagctgaaaactgtagccagtttttgaaccactgccacagttaagaaaggacaactgacaaccagggcctcaaacggagtagtctcagtcccagtggtgacttgccaggagtgggggtgagggagtgtccgtaaaagacaaagagtttgtgtttaattttaatttttacaattttattgagctaaaatttggtgcaacttctctagctcagtttgatgcaatttctctagcagatccccattttgtagagtgtatacttatattaaagggactcaataaaatgaatgtaaaattacaaatataaaattaggcacaagagtttggaagaggcccctaaaaaggagaagcccttaagctaagcttcattagcttcttctcagtgaattcttgctactctgacccaaagtccttttttttgtttgtttttgtgttttggaaacagagcctcactctgtcaagcagactggagtgcagtgacaggatcccagctcactgcagcctcaacgacctgggcccaagcaatcctcccacctcagccttcccaagtagcggggactgcaggtgcacagaaccatgcctggctaattttcagatttgtcatagagatgtgtctttctatgttgcccaggctgggctcgaattcctggccttacgagatcctccctgcctcggcctcctgaagtgtgggattatagatatgagccacgggacctggcctcaccaaaagttcttaaaccaagaaaacacagggcagtaacaggtattcttccttttcttgaagaattatcctgccaaaacagtttccccacagtttgtggtgaaagctagaggcatcctgaggcatcccaaggcagccttggaagactgcgatctatgttcctttggggatacttgagtttctgtggatggaaatgctctggagaagctctatttgttgacagtggcagacacccagttcttgatgttcataaaactatggcaggcagagttgggaaagatatattaggtcataaatctagatttgggtccaaggcagaatggttcaccattgtagtcattccaagtcattgtccaggcagctttgaaatatcttgagggcctaactcttagaaggctatttttctcctctggttcctgggcaaatgttggggtatttgattttttcttttttaaaaagacatgttagaattggagccacagaactacttaattatctccattcacctaaatttctatagtggtttccttatgaagaaaacaattaatgtagagaggccctagtacctctggcataaagttgtcatcaaagaacaaatcaatgattttctttggttccttgtatttcaccttttgtgttgagttttgtttcagctttaaggaaaaagcaaacttgctgggcttctcattagccagcattatcaagaatgagtaagatttaaaagctcctttttgttaatggaaaggaattagcttccttgcctttcctataaacatttacattgagtctgtttactcctgtcattggtaaacctcatttgttcccaagttttattttaggctattacagggctaagaaaaaaatgggaaatcctaaaactaagctttcattttttcatgttttcttttaacttcatattgaatgatcctaatcttccaaaagattttagtggctactgttgtgtagcaaagagggagactgttctagactacaaagagagtagacttgaattaatacaattgcttgactaatgtatgctatatgtcattagtgaaatcatttatgtgccttgcatgcatgcatgtgtgtgcatgtatgtgatgtgatgtggtttgcttgcttgttcatgaaaatattcagaacaattctctttttgatcagtaatgctactagcaaatacagaagtgctgaagaataatatgatatttgaatatttgcatttgaaagcctattatcattttaaaccaagacaagtgggtgttagtttactgatgccagtgacatcagcattagtaatgggctcttttagcaaaaagcaatcctcaaaagtctttttttttttttttttaagaattctgaaagatgagctcccagttaatcaactctcaaggagctgactgtaaatgttatctgagttaaacttatctgaatttaattagattaaaaagttgactgggaattcatccaaaatgtgctcatcaaaaaacaaaggtatttgaaagtggaggaaaacaaacaggattatgggtgacaaaattaatttgaaatctcttaaacctggaaaaatcattaaagatagaaatgctgaatgtaaatcattttatttttattttaaaaataattaatgaaatatgtctatccctggggttttctgtgacatgttcctttcagaaaagtgctcttccacactaacaaataaaaattatcaaaaggtacaaaattaaccaaaggtacaacatcactgaaaatcaccataaggccaggcgcggtggctcaagcctgtaatcccaggcttgaggcccaggctttgggaggcccaggcgggcggatgacgaggtcaggagatcgagaccattctggctaacaaggtgaaaccccgtctctactaaaaatacaaaaaattagccgggcgtattggcgggcgcctgtagtcccagctgctcagaaggctgaggcaggagaatggtgtgagcccgggaggcggagcttgcagtgagccgagatcgcgccactgcactccagcctgggcgacagagtgagactccatctcaaaaaaaaaaaaaagaaaaaaacagaaaatcaccataataatatttttccacccaaatcattcaatttgccaaaatactttttgttataatttgtggatgtagttaaatgtaatctcataaagaattaaaagtattttaattgtgcattaaccaaattctgtttaggaaaaataataaaattacttgaatttagaactgttcggaaaattataaactatataatgaaaagttcatactgctagtgacctcaatatgggggctataccaaatttcttactggcaaataaattgtaagctcttaaatagatggatatctgtcctgaatcgaatgctttagataagggttgggcttaatataagtgtttgtagcacaaatgaacatgattgaattcaggtaggtcttaagttgttcactgtttgctatatattttcctgattgtcttttttagttatgcctcatttaaatagtaactgaccaagtgataacaactatatgtatttaaaatgctctctgtgcagatgagcactttcaaaagttctccaaaaattagcatgtctacattggttaggaatttggcttaaaaagaaaaaaaataattttctcatataatatgtaatatttaaaaatctagtggtagaatagatccagtttcttaaacaatgcctttctttaaatctaactttactactttctgtgctgctttaaatgtctttctttaaatctaactttactactttctgcgctgctttcattcataggtatatctagtagcaaagatggaaccacccagcaaccccagggagaaggagagtgtttgttttaccatagaagctgagttcccattgccctagcttgtatcacatgcccatccctcaaccatacactagtgctgcagtggtgagctggtgtattattaatagtttcttatggctcccataacaaatttccaaaaactggtggcttaaaacaaaagaaattgattatctcacatttatggaggccactagtccaaagtcaaggtgtcagcagggtcatgctacctctggaagctctgggggagattttgtttctttctcatccagcttctggtgcctccaggtattccttggtttccggccacatcactgcaatctcggcctgtgtggccattgcttcctcatcttatctttatgtctctttggtgtgtctgtgtcaaattgcttctgcctttatcccataagggtacacatgattgtatatagagcccacatggataatccaggaggatttcatctcaagatccttaacctagtcacacgtgcaaaggccttttttcaaataaggtcacattcacaagttccacaggctaggatttggacatatctttttaggggccaccattcaacccactacagctgccagtttaacaatctccttggcaagaaagggtataccctgatcttgtagcatttgcccagttctgtagtgtaaacgctgctaccatggccaacttcaagctatcaaagggaagtcaatgaacatggaattgggaagagatgtatagcagcacgccattatccggtgtttctactaccagatccaacagatgtaagtaaactcaagagcataaataatagtaaaatgcagtcaaatgattaggaagtgatgataaggttgatgtatcattaccttcatttttaacataatttaattataaggttgtgaactttaaattttaatggtgagtgtttaacaactggcacatgaaatttctgaacatttaccagttgatttggatgagttgatatgagttggctgcaacagaccactggataaaatacgctgactgatggggcctgagtcatagagcctagggtgtaaggtcagcaatagccaaaccacatgaactggaaatagggtgtgtggtttcttttagagaaaactggggtgctactacctaaagaaggagaaagtaacattgggaagacaaaaacaacgaatccacctcagtcctcagtgtcattgtttcaacatattttaatgatttcaggctaggaaaaaactttcagcaaagtttccaagaattacaagtatgactgctgtgggtatgcacgtacctgcaaatcagactctctcctcctatggaaaaaaacacagtttttcacatttccattttagttagcccataaaatctggctttttaagcctggacacatttatcccaaagtgattgtgctcagaaaatgtgaaagaaacgaacagcctttttttaaagtatatattttttagtttttagcagttttatttatgtatttatatataattcacattttatataaatataaaattattttatatagtatatatttattgatatatgagttatatatcaataaatagatattaattatgtaaataaacttatgtctaattcacacattgtgcaattcatccatttaaagggcaaaatgcaatggtttttaacaaaatcacaaagttgcacaaccatcactacaattaattttacaacatttaatcaacctaaaaagaaactctgcaccactttgctgtcatcctccaggctccccaaactctccccaagctctagccaatcactagtctagtttctgtccctatagaattgcctattctaggaatttcatataagtagaatggtacaatacatattcttttgtgacaggcttctcttacttagcatgatattttaaggtccatccttgttaacgcatgtattaatatttcatttctttcttcaccaaatagcattccattacacgtatatcccacgttaagtttatccattcattggttgatggacgtgtggattgctttccctttttggctattatgaaaaggctgctgtgaacattcatttacaggtttttacgtggacataagtttccatttctcttaaaccaatggtctctttagtaagtgttcttattttccacatgattaaggaaactgctatttaggagttaactcagaaatatctcatgtagaatttcaaacctcttgaatattgggtcactacctccaaccctgctatttcttggtagggaggaggagggtgctgtctatcaggaaaaagttggatctgacttggggctcacagatcactgcacaggggtgactgaattccctttgcagcacctgaggccaggtctggcccacaactggctcacagtaatcagcccatcacagtgttccttcagggactctccacatataaagtatacagagtaagaaaaataaaaccttagtctctgacctggaaatcagagtcatggggtttgggaaacttgcaggaaagaagaggaaaaaaaaaatagctttcctgatagaagccaatgaagttaattttctcccttgtgtgacttggaggagttctttggtgtgtcctgcagacctgcaatgaaaaagaaggccctatattaatttatacagcaactcttttccaagaaattcagagcatttcaaacagtctttcactcattcccctgagggattttgcacagtgtgcataagaaattacttcttttaaaatttacactcttcagttagccagtactgagcagaaatagaactagaaaagcagacctcctgaccaaacattccgctataatattttcagtgagcttctataaatcagtgtatatccttaaaaacaggatctccccataacagccccatgaccactcaccggtgactgacattcctttcagcaagagcaaaagtttcccttccaaattagaatccactggtatggcatgcactataaaactgaagtgtatcattattcataattaagtgctcaggatcacccagaccctcagaccatccagttttactctccagctcagccctcctaactcaccccagctgaggaccccttaataatcctgaaactggtggagtgcaagagaggagtcctgctcgtaaaccccaggcaaaaaacaggagacgaaatcagtcctgctctcactgttgtttcttgctctgtctcggtgctgtttttacacggggctgcactgcccctcagggccttgctgaccattctgggtagcatattcagctccagcttcccaaagcccaccagcatcagccacatgcagggctaaacttagccctcaaccccaaacactagttcctcgtgtggggccttttctcaagatattcttattgtgaaatcctcagtatccatccctgggaaaagaaaatcttggtccgagccacactagctcatgtggaatcttgggaaataacatcctggggagtatctgtgcctttctttttcccacttcaagaaaacctctgggatccataagttccctcctagtgactaccagagaatgggaagttttaatccagttagtgacaaaaagtgcgtactagtgtctcacgctgccccagcctcaggcatattttgtttgggaccccataatcttaatatgcacattatttaaaacgtgtactagttgtcagctagcactggccacacagtttgtgagggaccagtgcaatgcaaaaatgcaagcccgttgttgaaagtttaagaattgcaaattggccttttttttttttttttatttgtttgtttgtttgaggcggagtctcgctctgtcacccaggctgcagtgcagtggcgtgatctcagctcactgcaagctccgcctcccgggttcatgccattctcctgcctcagcctccggagtagctgggactacaggcacccgccaccacgactggctaatttctttgtatttttagtagagacagggtttcaccgtgttaggcaggatggtctcgaactcctgaccttgtgatccacctgcctcggcctcccagagtgttgggattacaggcgtgagccactgcagccggccaggcaagcagggtatttaagccaacgtggggcacttctaagtatgggatcccgtgtgactgcaaaggacacacacccaggaagccagccctgctgccaatatttaaaaagcaaaagattcttcaaatagagaatctggtaaccctgggtctgcatctccaaatggctgtacataatgggctggtgcagagtatcatcttgttgtattggtttgctgcgcttgccattacaaaatactgcagattgggtggcttaaacagcagaaatttattttctcacaattctaggggctcaagtctgagatcaagttgtcagcagggttggtttcttccgaggcctctttctttgtagatggctacctactccgtcttcatatggtcttccctctatacatgtctgtgtcctaatcacttcttacagggactccaccagtcatactggattagggcccacttcataataacttaagtacccccttaaaggccctatctccaaatacagtcacattctgaggtatcaagggtgattttggagtggcacagttcagcctgtaacacagcttttccctttggggaggggtgcagtgttccaagtcactgtgcttactccaacccaaacatgctcacacacacacagcatctccccatccctgaagcaggggtcggttgctataggtcatctcatttgtgctgctgttcttcctctggttcgcttctctcatttagagagacctgctcctcccctgccgcacaaggaatagtgacagtgttcacaacaggacaagggctacacactcccttcacatctgtaaagctaaggttgctgttcaagtgatccttcacgggacaatccatttctacacacacacacacacacacacacacacacacacacagagtacccattacatagagataaccatttaaatgcaatgctgaaggaaaaaattgccatgaggtataactgactgctcacctcagaaactagatttggagattttaggagagaaaaaccctcagcgactacataattattccccagggctgatcccacttaaaaattcacctgactgtacaagggatggccctaaatttcaatggaaacccaaccatgtagccccttagagagaccgtactctcaaattggtctttgtacctatttgtagaaaaatgttagccagattatagctgaaaactctgctaattctggggaagattttggtcttgtgcctggaactattgaagcatatattcacacctaccacatgtaacacttagtagcagaatttccagcacaatactttagtactttatttttaaaagaaacagagcagagactgaagccctgttcactctgcagctttcttgcaggaggctccacaaaaggtggtggtgagggaggttctgtgctcaaaagagctatttttttatttttaaaaggaaaggagacactaaaatctttgctcacaattagggaactcatgatgctgaaacataacatttgcacctgcctgtagattgaaaaaataatgtcaaatttgcaaggctctgagaaaatagggtgcggtgtattagtgatttaatcaatcccaatcaacattagagttcagacaacaccttacagacatcttactgtaacccctttggtttttagagaaggaaggggaggttggaacattttaagtgatttgccccagatcagctctccacctaaaatgcaggtcttttctttcagatgagcgtactttccactgcaccaggctacttctaaacaggcattgtcctgtcagcctcaattgcatgcaaaaaaaaaaaaaaaaaaagacaaaacccctctcgctctccactagagtctctatttggactctagaacggacaaagcaacggctatttcaacttcaactcccttagcaaatggaagaaaaggcatctgacccgtggactcctccagctggtccccgggtctcaccgcctgcgggtctccacgtcagctcgcaggcatcggcggccagtcggacaccagggggcgcagcagcctttgtcctgacaggtattgaagaatgaagccagactgggccgtcaagaaaaatctgacttccctcctttcagtttctctcattggaaccagcccactccccagcccccttcattcgccttaaagccattttctgcttcctcctcatgctcagattctcagggtgcagggatgcagcagttcagagacccctctccaggagctcccccgctctgccaaggacaccctagcagtggtccaccatttgttctcacttgcaggcctctgaactcaggatgtttttggctattcttcctgaatgaagaaccctatagaacaggaccagcttcccagaagaactgtcacatctatcctctaatatccctcccctttccacgcacaaaaacaatcacaaattaaataacatgtctgggaagctcacgcggcctggacctatccctcaccaccctctgtctgcccctacagtctaaggacagcctttggtagtagctacctacccaaagggacaggctgcagcaccttcaccatacctctgccattctcaccaacccatggtgcaccccaagcaggataactgcctccttgtaaccccaccagcttgcctctgtgtgccctccagcagaaagaaatccacttgacccttgccaaagtctcctgattccaaagattcagtaataaatgagcatcctcttctactttaagacatactcctaaccctgcccctatagacacaaacggacacaatgcaaaccctcagatgtcaaaaacgtactctttcacaaagactcctgaaactcctctgttccagagggaaaggctacagggtccttcctatgcaggcctttgaaaagcagctgtatgtttacatagagagattccaagtttacacagtcctttccctgtctgttattggagcctctcaacaacgctgagagataagcagtgaaatctaaagcttagaggcttgcctcaggaccagacctagtacagcgtagaaacagcactgagggcccgggtgacagagcatggaaacacttgcttgtccaattgcaccaaggcctggaagaaatgcagccaccatagaagatcatcagattacatacactgagggagcctgtggtctcaggagccaggcaggggcaggaggaacagtgcaaaagaagcggtgatgtcaattctgacccgactcttctttttacctgtggcctcgctcacttctttatttccacgttcatcttagctaatgtagagtaccgggaagtgctgagcccggagacaggtagccatggtttgttatcttggtggtgagcctcccaactccacactcataaaataatgataacatctattatatatacaaatacatcaccaaaaaaaaatgaaaaaatcagtgtaattccaggagacggagcagggtaggagacttttactttcattttatgctgttttctattatttgaagtatctggatttacgcatgtgttccttttatgattttatttttaaaattttattggggttaatgatgctctttagcgttgctgcaaagatgacttatgtaacatatctggcatggtacgtggtctggtgcacagttgatgctcactcaacagtagtttattgttagctatatacttccgtcagaactgtgggcaaatgggacctcaaatcaagagacccggggtctgtggcacactctgctctcagatccatgtatgccttttagtaagtcaagtcccttggaatctatgtaaacatagtagctgcttttcaaaggcctgcataggaaggaatctgtgcctcagtttctttatctgtaaagcaatgagacacaagccacttgatttgaaaaatggtgagaaggacaggacaacatgctcaccacccaaaatgcctgagataccttctaaaattcagtcacagtctttgcaagggaggcttcttaagtttgagttcatcagacagaaactctttctaggagaagttgtcatctaggatagacagaaagggctggagatagctgaataagttctaaagcaagtacagaaattaaatcaggaaacaatgtgtgaacagtatagggccatcagcgtaggatgggaggtgagaaaagaaggtttgaggtgttccttgagtgcagttggcaccacgatcatttcctgacaggggagatgcccttggtaggcagaaggggtgtgattcaaggtccaggcatccctggcccggacacagccagccctagcccagctccctaggatgagagttctgtatggggcacagggctggcgctgttgagaccaggcctccctaggcagatccaggagcagagctgccctttggacaaattactttcggcaaagtcagaaggaacccactgcccaagagaattgggctaaagcacctctgaagtttcttccagcataaactttatcttaacaacaaccaaaaaaagtggggagactggaccataggaggtgcagatgcccaaacatgatcctctccctgcttagcagctagtctggggatacctattttttatgcactccaactcctgaaaaccaactaaagatttgttcctggaacacacagctgattcatttcctacgccactcagaacgggagatttccctccgagtctcctttgccaaagcttggcctttgggggataggaggcaggtagtctagtgggtagaaaggtcgcgactttcttttgccccgcggtctccttcctatttaaagcagcaccgcctgtcgaaacagctttgtgccaatatttgcaggcaggaagattttctgacattgtaagggggttgttggaagcagatgggaggccctttcccaaggccatcggcagaccagaaattggttacacccgcacccagggaggaatccctagcccccactctcacgatcagcgcccataaggtatctgcatttacattttaaaaagaaagaggaattttttttgtatctctgaatcatctggcagcgcctgatattatacatctccccctaaagcccctgttgtccctccctaaagaggaggtcgtgttttcaattcttgagagatctggaataacggtatcagagcatgccaacagctagaagacccccaacttccccccccaccccacccaggtctttcgccctataggaattgggggcagcgggggtggcgatttgcagcgaggcaagggcaggtagcaacaactccgactgatctccagaggcaaaaccaaactaaacgtagttccaaccatcatgttttaacaaaatctgcattctgtgaaagtctgtttttttcttagagaaacgcccttcgtttttaattttgcgtcactttcgcaggctgccctgaatgcctaaccacttgttaaaatgcctctgtgctttgcttttccgtgtggttcttttctgtgcccgtttgtatctctaataagcggcattgtttattatccttgggtcggggcccctgggactgaaccgaaataatacagaggcaccgaggctgagcgctggaaaatactccgggtttcccaggcccaggagggtccccggggccgccaaacgaccctcctggggaaagcccacccgtgcgtgcgtgcctggtgaagggcaagtttgcacgagtttttccaggcagggagagatcatgggcaatccaaagcccagatgagtgggtatagaaaggggcacacggggaagggaaatgccactgtggaccggtaatgggggtgtgacttaagagccaatattgacaggatgactttttttaagggaggcgggggactgccgcgcgggaagcgttctgagccgtcttttagctcgaagtctcaactctcatccctatgcaagaaattgtcactaataaattcttttttccgcatagcccatcagtcctcgctgttaaagcgagtatcctaaacaagatgaggctaacttccctccttctccgtagttacctaatatttgcccacatttcgttttcagctgggtgctttgtggccgtagggaatgtaagtgcatgccccaggaaataaagtgccgctgttccccagccacagatcaagtcttttcttccctttggaccccaaacgagccctgctttggggctctccaaaatttcgctgctcccaaaacggagtggggttcgctatcaaaaagcagaaacccgcatgggaaacataacgcggaatgcctttggcgtctcggggaaaatttcccggttgaacccagtctacgcttccacaccccctaaatttaatgtcgggcgggctccgttgcagagtttgccctaaagaaggttgttaaatacgtgccattctcgggaccgtgtgctcctcaaatgagacttccagccccagggcccagcctgaactgtccttcccacaggttcgcatgcgagaccaaacccccaccccgctagcttccaaaaattctcccaacaggctacaaagactgctcaaattgtcctcgctagcttcgctcccccattcagttagattgtttaaaaatacagagatctgtttgctcgcaagagcagagagtgatttccctcaagcaactcgtgcgagagctttaggcagcccctgggttgcagcgagtccaagcgtcggtggagttttccgaatttcaagaagtagtaaagtgaatttcggtacagggaaaagtgccgggtgttggagcgcaaggtgggggcgggagcccaggaagccgccaggaggtttttttgtttttaatgttagacacgcatgaaggcgcaagcttcgtggtttccgaacttagagaatcgtgccgagtttgggcccatctccgcagccaggggcccagcacagagcacagggggctgtttccagttttcaaagagcgagcagaggcgcgggagcagctcgctaggcactgccacatgcagctgactgtccgctgctcccggctcttccgccctctctcttcgcgtggcacccccagagccatcccactgctgccagtattgcgcagaagaagaagggttccaggcggcagaatcccccaacaggtagtttcacccgggcgctggcctggcttaaatatcaaaggctgggccgcctgtgccgtgctaaactggagccgaagcactgacacctaaagagtctaggaacgaaagctgcgttctgggagtcactttaaataaccttgttttctctccaccctccaacttctcccgaaatagcgtgagccctgccgtttggaacggcgctcagcgagcctaaataagctgcttcaggctgtaaactcacagccaatttggggtcttttttttttttcacccccggtagttactacagaacccaactcggctttagagccataggtatttatttgggaattggaaaattcccctcaaagcaaaaaaggaaaagggtgcgctgcagttgtatgatataattgaattatgccttcccctggcgcacagtaaggaaaagcggaatgccagtaggtgtgtagaatgggccgcggcggcctcacgccccagagggcgcaccacatttccttcccagggtgcagggagaacttgggttgggcgacttcgttccgcccccagcataaatgcccaggttagggcatcacaaaaacctagtcctgggtgctctgtcggatcgctagcaccaacgtccccgccaaggaccgcgagcgcacgtggtgcgcggagaccagacaccgcgtgcgacgcgaaactacgcgcgtcgctccaaagctccctggcgcgcgcgcgcgctcggcccttgctgggcggcgggatactgggaccctcggcgagagaatctaatcccgccttggcagataagacttgccctctaccgccctgagccgtcgccgggtagtgatttctgcacggaaaaaaaaccgcggaactcctggccctgccttgtctgtttcctaaggaaatgtcttttacactccgcacagtcacccgaccccccagtgcctctgggaccttgggcggacctgaccgaagagacttggatcttcaaccgcctagggagctggccactccttcccttctcccttctcccctctcccaatcgcacccagctcactccctccacacccgccccagcactgttagcttgccctgagcctccgccactaactgcgctacctaaactttccaaagaaaagttttctcgcgctttgccagctcaagtttgccccagctggcgctggcaggaggagaaaaggagtccctcttccccctccacctatcctcctctccctcccgtcctctccctcccctaggagtccaaaccttgagggtgggagcgcgcggtggtggagcccccgaaggcactgactgtgcaggggacggagttcgtttctcatcccccactctcagtgcctcgaccgttcccgccccctcctcccccacctcgctttcggcggggaactgcgggcttgtagtttagttttgttcaaatttatttctcttttttaagattttttttttttttttaagatcccacccttcccaagcctcgcgcgtctgcctgccttccagctcccggcgtggagctcaggagacgcacccttcgcgccgggcgggttgtctcccgagtgggggccaggggctccctggccgcgatttcgctggcctagtttcgtctccctaggagacctaggtcctgttgtgaggctaattcgtgcgggagctcggcctcacagtaagtgcctcttaccccaccctcacccgaagctgtcgatgcagcgggtttagggggatgtttgcgagacagcaataggtagcagttgataggagaccctgttctgacgtcttcttgagttctttacacatacaggtaattagagatagaaaagatccccccctcaaggttctataactccttgcgcaccgccaggtgaccatcacagaaaccgccccaagctagttaatttgtggcctattatgtttttattttgtctaggattaacgagatttgagattttgtagccaaatttactaccccggggcttcaactttcaaaccagcaagccaacgggaacgttgtggcgaaactggatctccttctgcgttgctggggcgcgtgcggggaatagaaacgaaatccgtcgccgacggtgtggcgtggactgctgggcctggggacgctgggcgggcttttctgaatcccatcgggttgggcttgaaatcggacttgaccctgccagggttgtgctctgcgcttagcctagatttttccacttggccagacggctcctatcacacgtggcagatgacgcccgtccggagcgacgttcccaggggcaagcggtttcaggatcacctttacctttagctcaggttacggggggggggtgtcggttacctcgtgtgactgcggatatgaaatctccacccagagcaaagatggctacaaatcctctcccctccgcatgaacatcaggagacttgactccggcgcccaccgcaagtctctttccagtgctggggtgaacacgtgccccacgcgccccccgcgcccgcggcgcgccccccttcccgtggcttagcacaggtcccgcttctactgtgcgcgccggggatcagggtcgtgcctcctcagcccacaggcgaggcctcccacccgctaggctggtccctgtaccacttggcccatgttgccaccatggcggtgtcagagaaagccctgcggagggtcaaccagaaaggcaggaagtttctaggctcctcgaaatggcacccgaggagaagcaaaaccgtgcagcgacattcgtggaacccctaagtcatctttgaaaggccgtttgaagagggaggggtgtgaggggagaaaaatacaggtgagggggaggataaagttatgggtgtaagccgcctcgcttcttaactctttacctaaccaccttcaagtctgagcggttgacacactgggcttttaagtaccaaactccacggagatggggcagaggagaagcacccccaaacccgcagagctagccgctgcccgctctctccaaatgtggcagccgcacttcggagcgcagaagcacggctctgatttgcgtttgcttcgaagataaaggatcccgttcacaaaggaacccctgcttccctttccctactccactcctctgcacctttcgcatagcctcagaccctttgattgcatttatttatttttaagctccggtaccctagatttcactgggagattttaaggcaagaatggagaaagatgggattaagaaaaagagctggctgtgttctagggcaaggttagagaggaattgaaaatcgagggtagatgaatttggggatgttttaaaatttcatttcccacagaagctacctcctttgcactagaacctatttaaattattgggacaggaggaagctaggagtctccgtgggaacaaaaagttaaaggctttggagatgcccctttctcttacctctactcaaatgaataaaaagcagctctcctttcaatttagtgactgtacccttcaacacgctcacttccgccgcgaaagtgtgttaatggccagttcccccagggaggccgagctcaggagagtggcccaagacggactcccagaacccctggagctgggctttttattctctaggatggatgctgggaagggccgaaggtggaagctgcagtgcctaggctgtaggggtgtgggaagaatgccccaaccacccctcttccttcaaagcccctcttctgctggttatttaaaccctcaagattgtatttctaatcttgatggctatgttgttcttttttgaaagtagcaatgtatgttggtagttcttttagtatgtatgcccttcatttgcttttgtttgtagttacggattttttttctcctttttgtctttcctttctttaccctgcagtcttggcaaccctgtaggaggaggttcagtggggaggatgaaatcgacccgtttattcttgttaatcacacacaaaacagtataaacactgactctcaattattaataggatccttctattaaaaaaacccagtcatttaggtagaactggttaggactgagaaatcgataatactggtgaactagcttattctgtccctttaagaaaaaatccataaagctcttccatcagcccagtgtctgggaaagaagcaaactaactgcttggaacaaaagagacaaagaggccaaacaacaaaacaaacaaacaactccctctaccccccccttctgagacaacaatagactagacacagcaagtgcagttactgcctggcccggctgctcctgtcgacctgccaagtctcccgcatttggctggagactttctctctcaccccactctcgcacccccatcacccccctctctcggccctttctgtctttctctctgtgtgactctctctgtgtgtgcctctcttggggtctggctatgtatgtgtgtgtctgtctctgttgtttttgctttcacttgatgtcgctctgtctcaggcaccttagtgtttctctctctctctctctctctctctctttctctctctctctccctctctttaaaggtcctcagcatattagcatactctggcatttatttacttatttgctaggccatttctgtagcatctcctaactgcctcctcaaaacttctgtttcttccagttgtcacggtggcctattttgtattttgtttgcagcactctctgccaggaagatgctgaagtccatttgcacttcagtttttaaccattcttcatgttcagttctttgctctctttctataaggtttctggcacacttccccccccgacccccccttgtccccaagcagccctttctctgcttcttggcactgcttgggactctcatgcatgcctgccctctttctctcactccctctctcttgtggccagccccctcctccctgtctcccaatccagcctttttcttccttttcccttctccaccaaactttaataaaatactgtacacacttttgcctggggattgcttttctttataaagtgaacctaaacctttgtaaagtgggaagggaggaaaggcaagaatccagactgcagccagcagaggctgtagcatggaaccagcatccctgccaacagccacatccctttcacacttttttttaataaaccctttgtaatagcaactccttctgaagcatctgtgtctgctacagggaaaacctggccacgtctctctactgggctgcaagggtgaggctgagtatccaatagggagggcagctgcagcctcagtcataagcactctcccccgccccagcccatttccacctcctcttagagaaaaatgagaaagtagggggttctctggcaccggggtagaggtcttcaattccccttcaagagaagtatagcatggttacttgaaacgaaacttctccaaggatggttgacttacagtaacaggggaaatttcaactgtcagaagattgtgggaaaaacaggactaaactgtttatctaaagcagatctgagaattcccacagtcaggtggtacagggttggcaaaatggtggcatcccctcgccacccactcccctacccccccggccatgctcactaggcaacagaaacaggacaaattatttccgttggcctcacccccttttctttccctcctttctttaataatatacagacaaaaacatatgaaaacaacataaggggcaactctgaagggagaaaactcatttagtctgagaagagtatgaaaaacagaaataggaaatgtaccctcattgtttggttgcttggtgataagggcagtatgaagaagcatcgatgttataaaacacacatatgcacatgcatatacacatgtgtatatggatgcatatttagttggtagtgacaacttgtcaagagaggaagggaggagttttaaaatcagacacacatggtttgaatataattggccacttattagctaggtgactatgtgtagcccgctacaccttcctcacagttggggttctctttagaactaagtggcattgcatatatgaaaaagccaaaagtaatgtctggcatgcagcctgggttcaataaacgagccttccttccctctttttctttcttcctccctatttcttttttctcttctttcctttcttccttctttccttcccttccctcctccctgcctcccgtcttccttccttccttccttccttctcatttcactggcttttcccctgatctttccaaaggtgtaagcaaagggaattcatgccacttgccccagttttcagttcctaagggaaactttgttgctccttgagtcccagtaatgaaacactgcagaccctatagtagtctactctttctaagccaaatgctgcctgaaataatttgttcttgggtgggattatttggctccattattctacccccttatctaggttctttattttcaaatggttaatgagagagacccttacccataatccagccatgtatacgttttcacaggcccagagagcttttgctctcggggacatattaaaaattgccccatggccaaaaagcttaagaagggagaaacagaaaagagtatgttccaatgaactattgtcctgacccacaacttcccaattgggaatgctgttttcttggtattttgaccttgtcaaaatgactgatttttttttttttttttcctcccgaggagtcactctctagctaagcaatgtttcttgagtgggattttgggctgagacatcagtgcatctggaagcactcactgatggagatgcctgtcctagcccgactgttgctgagattccctctctttctttgtcttccccagaagcagaaccaggttgtaacagcaactggcaagcccgtgagccatggatgagcccccagcttcaattggtgggagagtgaacacataaaaaatgttcccacctcagacttcctttttccatgggtcttattgtctattctacagataccccatttccacatttcactggcttcctgtcctattttcctgttttatcggagccttggcaaccagtgagcggcactgacactggagtctgtgctggggaggtggccagtccctcacagtcccttcccagcacttctgatccttctctttgcttgtcttactacctacctgttttcattgagggcctctgctacttatgacatagatgtggaaacctgtttcatctttctccctccttgggcattccagtttccatgtggctcctttctgtaaactacaaagagagctgtccatccttcctggaagcaccccttctcattgcagatttcaactcccacgcaccaggtacccatgggcagtccacaacctgcacaaccaagcacgggtactctaaattccccagttctgacagctgtgagtgctggtgagcacttagtcatttagggatgtttccctcaaatggaaaagaccacaacgtgtgatgccagaagactagcagattctgaagccttccaaagccctgtcttgcattcttcttgggctcttgtccaggaagaagctggagactgtgtttctttatcttgtctttgacctacattcctcatctactaaggcttcattggcataccaatggcagacaggtatttgttactgcaatgggtacaacgagtattaacgtataaataagaaccactaccgccaccgcccacccgctcccacccaaccccgacactggtcagtcctctgttctttccatgactttacttctagtaggccagtttttatactaagtcagtaactcatttccggaccacctgagaggtagccctactcttaagttggcacaactgcctacagagcaaaagttaagtttggaaaaaatgccaggcataaataccaccaccagattaatagattccaaaccacatcattctgagctggcaatgtaattcacattctgcacaacgaaaaggtttgaagagcagccagtttcctgttcgagagaaaagtttgcttctacttgctaagttacagccattctgtatgaaccccttctatagaacaagaaacttctcagtttaggagtctttggaaaaacattttatcctctgagttggctcccaaccccactgcacattagaatcatctggggagctttaaaaagttaccagtgcctgggcttctcctcaatccaattaaattagaattgctacgagtgtggtgtgggcatcggtattcttttttacaagttcccctgggcgattctaatgtttagctagggttgagaactctaatttatagtttaagagaatagtgcctcttggtgaagaacgcccattcttttactaagtatgcaatgaactcctattattggagacagtttgctgaagacacaaagatgaagtcggtaggcactgggctccttaagttaaaatgtggtaggaaaatgctaatgcgcagatcagaacctctagaagcaagattgagtgcttctaagttcttacaaacagcacaggactgaaagttagagccccactttacaattcaggttctgtcactaactagaaaggtgaactttggacaactcacttgacctctttgggcctcagtctggtcatctgtaagaagaagtggctggactgaaaactctatatactccagccttacggtgcattcctaaattcttagaaacccataagcttagccaggcaattaccaaatactttgggaggctggctcacttactcctgcatgccactgacgactgtctttctgatgttttaccaaatccctttccaaaaccccaagtatcagggtgttaatttttaaataatcctgggctcccttaattctctcccctagtctcttacaaattagcagatgaagagaatggagtagtggtaatgtctatgagcagtgggtaatgactaacagaagtttatccagttggataaatgtctagtggattgctgctggggtcagtgttagttctggtcttaattaacatcttcattaatagtgtgggagagggaataaacaatagctaatgatatttgcagatggtagtaaatttagaggtgttgctactaccagtgagagcagcaagagccatggggatatcagagatgtgaacaagaagtgattataatgatgtttgttctggaaaaggcagaatgaaatgtttaagggggaaacaacgggggaaattgggaaatgatcaaagaatcagccattcttttatcaaagaatcgccattctttgtaacctgggtgtgcgtttagcaaacgaggcagctaatagtcttacaacttccgttgcacatactgggatgttgtcctgaacaacaataataatcacagcaacaacaataatagtaataatagccaacatttttgagtgcttacaataggtcagacagggttccaagtgatttacgtgaaagcaatttttgtccctaaaatcatgattcagttcttctaggctttttacattttctgacaggatacttgctacagatctgcaatttctagatttgaacaaacctgtgagtttcaggggaaacaagaagtttaaaatgggatggccaagtaaagtggagaatatggtgtgtcctcttttcccaggctcatgagcagaatgtttccatctttgatttttcctgtccccaacctgcctaccatcttttctctatttaggcaattgctgggttaacgtgattggtgacagtagacggaaaactatcgcaaaggttcagaaagaaaggaaagaagggagggggatccaaggggggaaggaggggcaggagaaaggaggagagggagatggatagatagatggatggatgaaggaaaaaagtaataacataaaggaaagagaaagaaacaagaatgagggaaggagggaagaaaggaaggaagaaaagaagaaaagaagagaaaaccctaatgtattactgtgtgtctaccacaagtcacacggtagctgaggtgatgagctaggtatatttcacatgttttctggtttaatctttgctgatctacttcccacaatgactctctccagtattcattattagccttcacttctgtagataaaataaagggaagctcagatgttaggtcactagctatgaacacacagctgatagattgcaaagaggttcaaactccagttgttctactcctaagctcatttcctttccaaccgcaaatacatattttcttttcttttcttttcttttttttttttgagacagagtctcgctctgtcacccaggctggagtgcagtggcgcgatctctgctcactgcaacctccgcctcccgggttcacgccattctcctgcctcagcctcccgagtagttgagactacaagcgcccgccaccatgcccggctaattttttgtatttttagtagagatggggtttcaccgtgttagacaggatggtctcgatcttctgaccttgtgatccgcctgcctcggcctcccaaagtgctgggattacaggcgtgagccactgcgcccggctacgtattttcttttctttcaatttagccctgcctgagttaatggcaacatacagctacacatagagagccagaaggtaaaaatattaagaaaagaatcaacaccgaggaacagagggacaaagggaaagtggccagtacatgcatttactgcccagtctaatgtaattgaattatttacaattacatcttgaaattacaaaacatagaattcataagcagaaaggtttcaagacaatggaacccataataatatggatttgaccttgagggaatttggcagacagcatcagtgtctgaaacaaaagtaaactgaaaagaaaaacagctgaatgtataaaagccaagactcttcttgggaagtgtggagcccgaggccagatggatgccaaaggtcttcaaaatgacatcaaaggagctttaggaagttggaaacgtgtggcctgggcatgtgtcccccgccaccccagtggggctccaaatgccaactcagggttagaaaatgagaactgaaattttaaagtgaggagatgtgcacttccgagtatacacataaaatgtctaattcaaagaatatagagtaaacaccaatgcaataatgaccccaagtcaagaaatataacattgccaggtccgcaccccatcacctccctctcctgagaggtaaccattattatgatttttctcaccatcatttccttgcttttacttttttattttgatttcagcacttttgtatgcctgtttttgaactttacataaataaaatcatactgcatgtatccttttatgacttgcttctttctttcaaccgtgtgttgtatataaataatacaatgcatttatccattctgtggttgagggaacttttgcttgtttctcctctggagcatttatggactattctactgagaacttcttgtatatgttaccttctgcacatgtgcaggagtctccctagggtagcagccagaaaactatcacccacaagccaaatagaacctgttaactgctcttatatgggttgagagctacgaatggtttttacattctgaaatggttggaagaacaaaaacaaagaagaataatatcccatgacatggaaaagttttatgaaattcaaatttcagtatccatatataaagttttatggaaacacagccaggctcattgtttatatattgtccgtggcccctttgtgtataacattggcagagttgagtagttgtgacggagagtgtatgacctgcaaaacctaaaatctgggcattatggctacaaaatgcccagtttcaactgaaaaattcagcagcgcttcttacttagataaaaagggaaaaaagcacaaaataaataaataaataaataaataaagtgtttcgatgtggtgactgcagagcattaaaccaagcacaggagctttctaagcacaggctctgggccactgcgcaggtccatgcccatgaagctggtcctgcttaaaatatctagtcctttacagaaaaggcttatggaccgcagcttcagagcatatctctagaagtgagattataagcatcttagaaaaagtgagttgctatatacaaaacacccagcaatgcctggttacttgtaagcattaccataaataggtggctctcctccttcccaccttccacctgggtttccccaggcccatgaggtcagtctgtagagtcattttccaaaaatgtcaggtgctcagctggtggtcagttaccataatagctgatgataatttggttaaataccaccacaatcccactcccttcagggctcatacatttataaaaacatatctttgaataaaaatgacttttaggcccaagggaataaaggaattaaaatccacaggtgctaattgcagcttcatgttgtaacatggtctgagcagattcaaggtttcttggagaaaacttgttaaaaacaagacaaaataccagaagagttcatccaaagataatattgaaggcacaaatctggagaactaacactacctgatttcaagacttcttataacgacacaatggtaactaagacagtgtggaattgacatggataaagacaaataaatcaatgaaacagaatagaaaaacagaaatagacccacatgtatgtggaaaactgactttggacaaaggtttgaactcgattcagtgggggaaaaaagtcttttcaatagatggtgttggaacaattaaatatccatataaaagtaatgaattttgactcataccttgcactaaatacaaagtttaactgaaaatggattatagatctcaatataaaacataaaactataaaatttctgaaagaaaacagagggaaaaaatctttcatgatgttggattaagcaaaatgtcttagatatgaagccaaaagctcaatccacaattttgacttcatcgaactttaaaaattctgctcttctaaagaacctgttagaagactgaaaagcaaaaccacagtgtggcagaaaatattgcaaatcaaacatctaataaaggctttgtattcacagtatacaaaaaacttaaaaattcagtaagaaaacaaacaacccaattttttaaatgggcaaaaagttttgaatacatattttaccagagaagatatagaaatggcaagtaagcacataaagagatgttcaacgctattatttattaaggagacaaatactacggtgataatgggatacactacatacttactagaatggctaaaaataaaagggcttgatcatactaagtgctggtgaggatgtggaggaatgggagctctcatacattgctggtggaattgtgaagtgatacagccacttttggaaaacggtgttgacattttcttaaaaagttaaacagacacctgccatatctgccatatgcccagacattccattgctagatatctacccaacagaattgaaagtacatgtccatacaaagacttgtacatgaatgttcatagcagctttatttgtaatagccaaaaattggaaaaaacctaattgtccatcaacaggtgacagataaattatgttatacaatacaatggagtactaatgagtaataaaaagaaatgaactattgttacaacaacatggatgaatatcaaaataattatgctgaaagaaagaagccagatgaaaaagagtacatactgtttgattccatttacataaaatgttataaaatgcaaattaagctataatgatagaaagtagatcagtggttgtaagggaggtagaaaaggacagagggatcaccaagaggcatataaacatttttagaggtaatagaaatgttgcctatcttgatggtggtaatggtttcatgggtgtatatggatgtcaaaacttatcaattagtacgctttaaacatgtgcagtttattgtatggcagttacacctgaataaacatgtttttttaaaaaaaatattgcaacattaaaagagtggaattgtaagcctcaaagtaggaagagaaatctgcaacagatataaactggcaaaggactcacgtgtagagtatacaaagaactcctacaaatcaacaagaaaaaggtagaagagtgcaaataaaaacgggaaaaatatttgaacagacatttcaaagaggatatccaaaaggttaataagcagatgaaaaggtgctcagcctcatcagtcatttgaaaaatgcaaattaaaaccacatggaaatattgctatacgttggaatatagtcttgatgaagatgtgaagcaattaaaactgatatactgctggtgggagtataaattactacatccactttggaaatccatttggcattgtctacgaaaatttaccacaggcatactttataactgagaaattctactcataggcttataccccaaaagaatgcatacatatgtgtaatagaaaacatgtagacaatgttcatatctccattatttatattggcctcaaactggaaacaacccaaggtttgttgggtacagaatagataaactgtgctgtatgcatacaatagaattccatactgcaatgtggaaacaacaaaacaaaacacggttacctgcaatcgcagagaggaatgtcacatgaaaggctgaacgaaataattcagacataacagtaaatattgtatgctttttcttatgtaaagttcaaaaccaggcagtacaagtttgtattgttagaaatcagtacagcggttgtctttgggaagaatattagggctagtaatttgctgagattgggagacggtttctgcattgccaataatttttcatctcttaagatgtatggtggtgacatggaaaatacatttagctatacactcgtgatgtatactttcctagatacacattatatagaaggttgttcttctcggtgttatataatattcaatggtatgaccacacgacaatttctttttcgaaagcacaggaagagagacaaggcagtcacttaggtcttactttttagggatccaaagacttaggccaaggctgctgaagtgactcttttcagtgactaagttttgaccaggctatagtgtggagtagttgaactataaaggtgcccatgatatgtctccccattagggagttgtggggcctagaatgagccctaagggaaggagaagagattttaagggtgggtacaagccactctgttgagtgggaggatgaggaaagaggggtgaagaaaaagtctgcttataattcatggctaagagctaaggctctagaaccacatttcctaggttcaaatcctgcctctgatacctgcaagctattgaccttgggtgatttatttattctctatgcacacaaatcttctcatctgtaaaacaagagacaagattacacctgtaatataggattattaggaggatcaaatgagataatgtatttcataagtgttgtgaaagtgagcataagccagagtgaaagggcatacatctctcaaagcattcaggcttgcagggtgctgccaaggagagaccaaggtggttccagatcagctgccaaagctctacaatagcgttccttggaggctgctctatcctgtctcctctctagatacccctgaatacccctgattgactgtaggctgtagaaaggctttgcacacttctcatttccttcttttgataaaagccttcctgcaagacttctagaattatcagaccacccttccgacctcattgaacagactggcaagctcatggcctcagaacaacagcacacaagctctatgtttctgttagctatagcctcattttcccctcccactccccatccgtctctctcctccacactagaatatcactggttttgttcgtactgtatttcctgggcacagcaggcattcacttgttgcctgataagtgacgacgtcttcttcaatagatgactaacactctttgtgttggtaggttctgatatgttctcaattcttagcatttgggcagcatcattcaatgcctgtcaccaaagcaccttttggacactgctccggtcctcactgctcccgtctcaacttgagcacagggcgtggcacaggggaggtgctccataaatatttatgaacatgcagttgctcaagatgctgttaaatttcttacctttctaggaaaaacctaaaagcaaccttgagataaaactgccccccagaaacttcaaactacaacacagtctactttatatccatctctcttggcatcagggagctagggagattcttcttgtgtgttttttttttttttttttttgacggagtctcgctctgttgcccaggctggagtgcagtggcacgatctctgctgactgcaacctctgcctcccaggttcaagcgattctcctgcctcagcctcccgaatagctgggattacaggcgcccaccacgacgcccagttagtttttgtatttttagtagagacggggtttcaccatgttggccaggctggtctctaactcctgacttcaagtgatccaccagcttcggcttcctaaagtgctggcattacaggtgtgagccaccccacctggcttcctcttggtttttaaactataattgcaaataaatgctatcacaggcctaggggcactcagagaggcttggagtctggtcattgtcgcagaccatatctattcttgtttatcatctctcaccctatttgaagaacgaggacaaagaaaagtaataatcgatatatagattcagaaaatatttattgagaaaggactatgtttcagaaacagtcctacatattttgacaaatgaaaaattttgatccccaaacaaccacactgaagcaggcatgattttcgaaggtaagggaatcgtggttaagaatcattacctgccttgtccagagtcacatagcctttgcgtggctaagtcaggatttgaacccaaaaagtcaatgcctccaggtccaagttgaaagcctatattccattactttcagaacatactggagaatgaatataaccttcttacattgacatgcctcgttttcaacccaaactggtttacccagcttgataagttctttaatccccacagggtattgaatgaatcctggctatatccaaaacttaaatccacactcaaaggaggaagatctaccctattgataatatttagaagaatgtgcctggggtttaaaaggcaatttcaaaagaagagtgataaaaatgctttgaggcatagtggaaagcctccaaggcaagtcctgtgactgggccccattcatctagtagtttcatgtccttgctgcataaactattaagctatggcaacgggcttgggaattagaatgacctggatcatgaatgctctgaccttcaattggttactcagtctttccaaacctccagtgcctcgtctttaaaagagcttagatgaaatacagtactgagcacagggcggaagcatagtgagacctcagtaaatagtaattattatcacttgtcttgatggtacttttaatctaaagttgggagaaaccattgccccagggaggccttgcttaattaaagtgctgccattggcctaaattggtcacagaagagaagatccggctggtaggtagtcacttaaaatgcccccgaaaaagcttgcatatctagacctcggggaaactcagtacagaggggctggactcctatatatgaagtagagagcccaagctgcccaattaacagggtgctttcattagaatatgggccattaagatcacatctatgaatgagcctggagcctgattgaatatggacctcttcttcacccaccaagagagtaactgtagactcaacatgtacataatgtacgagcttctcaattattcaccgtgttgactctgtggcactctatgtgtgtcctcaggtctacctccatttgggagcaaaacctagagagtggtgttctgtctaaaaaaacaaagcactgcaagtacaaactacacaggatgcttatgatgatgaaatggcagtgattgtcatcaaatcccattttctaggcaaatttctaagaattttacaacagacatggatcatcattcttagatggtatacatttgttattttcatagaatggatttattaaaacacggttaaaaactatttaaaaaacgtttttcaaaacttttcaaaatcttaaaatcatttaaaaaaaaatgcttggttgcaccatgtgttctgatttagtgatcggaaaatatggtctctgtacagagggaatctttatattttttaggatgatgattctctactagggtcttagcacatgatcacatttctgtgaggtatgtcagataagaatattataaagtatttaactttttagttaggtacttcctttatcaattagagcatatttgatgttatccccataaagtgatcatcctccctcacttgcattctgttactggttttcgtttgtttgtttctttgttttctgttttgttttttgagacggagtctctctctgtggcccaggctggagtgcagtggcgcgatcttggctcacttcaacctctgcctccagggttcaagtgattctcctgcctcagcttcccgagtagctgagactacaggcctgtgccaccacccacgcccagctaattttttgtatttttagtagagacggggtttcaccgtattagccaggatggtcttgatctcctgacctcgtgatccgcctgcctcagcctcccaaagtgctgggattacaggcgtgagccactgtgcccggcctgttactgggtttttaataagagaaagatggctgggcgtggtggctcacgcctataatcccagcactttgggaggctgaggcgggtggatcatgaggtcaggagttggagaccagcctgggcaatatggtgaaactccatctctactaaaaatacaaaaattggccaggcatggtggtacgcacctgtagtctcagctgctcgggaggctgaggcagaagaattgcttgaacctgggaggtggaggttgcagtgagccgaggttgcgccactgcactccagcctgggtgacagagtgagactccgtcttaaaaaagaaaaaaagaaaaagagaaagacaaggagtcactcactgtgagtgggcccaggatttgcaggggggtcaggtgtttggcatgtggacatcaaatgttaattatgacctggagcataaaaggtgatgagtggctatcctgggacatttcagtctataaaggagcttgtggtcacagtagttatggtgaggctgctcatactggcacacagaagccccttccccacatgctctgaaaaaaacattaatacaaagagtgcttgtttagagtcaggaggtgtcctttaggatgctggcactgcaactaactagcttagcagccataagtaagtcactttacctctctgaactttgtttttcatctataagaagagcatttgatctagatcaagaactgtacacttaggggtatagaaagcaagtcagaaatctaagtgaggaaagcaggccaatatgatacaagaaggggcaaaggggactgtggagaccaagccccatctaaagggggcagttgctactccactccaaactcttcgtgttatgtgcaacacttgcccaaaaagtctcaccttccactttttcaaaaaaagcaaaatatctagatttttcaacaaaatatatcaagttttaaatgttaacagtaaatatcaacattacaaatttaggagggaaaaaacaaaagttggttccagttttgtttcttaatctcttatctacaggtctcaaaagtctcttttaattttaacaactttacaattctgtgaccatttgtcactaatttcacaattttgtgaccattcactaatatcaacaatacaaatagaaaattaagtggaaaaattatgaaatgaaattatattcattttaagattataactatgcaatcatatatatatatattacatataagcagataccagatatatgcacatgaaacaaattttttaggtgatgggactgtgggtggatatcttttttatcttgttaattgttcatttaaagtatctctactattgttcatataaccaaaaaaaattaaagataatggttaaaatatatatatatattaagggcagctcagggccccatgccatggctcacgcctataataatcctagcactttgggaggctgaggcaggaagaccacttgagcccaggagtttgagaccagactaggcaacatggttacatcccatctctacaaaaaaatgtaaaaaattagccaggcatggtggtgcacacctgtggtggcagctactcaggaggctgaggtgggaggatcccttgggtctggaggtcaaggatgtagtgagccctgatagcaccactgcactccaggtttggtgacagagtaagaccttatcacaaaagaaaaaaaggcggggagcaattcagaaggtgccagatatgaagagaaaaaagcagaggcagtgactttaggtatgttcctaaaacttgtatttctattctgacctccatatttgcttgtcaatcatcctcgaacaaaaagttggtaaaagaaagcagtactggttgggtgctaggtaaattctatgtgcctgaatttttccatctaccactgctcccttctctcttcttctgtttacaaaaatatttctcacatcatgaaccatagtggtatcaaaattttcccaactttgtttgtttgacttttgaatatattataggagggttttgttttggtttgttttgttttagtggatgaagtgggatgagaagggcagctgacttatcatccctaattacatttttctttggtttctatatgaacactattttcattctacaagcccacatcagctgcttgcaaagtgagcagaaaaccacaggttgttatttagagtttatttgaaggttttcaaaacaccccatgggaaggctactcttttctaaacaaatttggaggaaaatattagcacaacagaatagaaggccttcatatcacgaatgcagagatcctcaaaaacctatctatacttgtatggcagcacccagcccaaggtccagacccatgctaagcatgcaatgtgtgtttgtagtaggaatgaattcctcctctactccctgggctgcacctacgatttcttacttacggaatatagacacaaaatatagttattgatcttctttaagtaaaaggcaacttgaaatgatatcaacatgttctagatatgccaacaggaatctgtgacactggggacatttggccacaggatttgaatataggggaattaacattgactttcttttgaatgtggcctcactgagcaaaaggcaggatggtcttttgccaggactatactgaaggatcagtagactgtctagcgctttcgtgcatcctgttgcctcactaatttctggattgccagatgcctctgttttttgaaaatggttaaaaaaaaaataccttagtaattctgttgtttcagaaaccttaatatggcataaaatatcctgaaattttttgcagaaaacacttgcttttttatgctcaatttaatcattatagctgaaattgattccaatttattgttttctttttaagggcattttgatggttgaaattctaaagttgcacaaaagtgtgagtaagcaagataggaagattaattgctcatagtatttttataagtcttaaaaacataaataggctaagaaatcgttgatacttcaaactgagaattcataacaattgcaataaacattattttttaaagctagaaggcatcctggatttaccactgttgaatcagagagcagatttttcacacattgagtcataactgcaggcttttttttttttttttttctgtaaaccactttaacctgctcttgaaaacctctggttggtgcatggaataagtctgagtctgtctctatttagcttgtgaaatttaacaaggccatagccgggggttggtaaggctatgagccataccaccatctcaggtttttgatgacaccacaaaccacttgagatttattatgttagaagatgtcatcagatctatgtgtgcacaggtgcagcatgtagttagtgaaagaaggaacactgcatgtgtatatttatttttgtacccatactctcaatggttagaaaatgacccagtgtgcctgtcctgggcagtgtggtgtttcaactccactgcagatgcctatcttgtaatttcttgaagtcttttccacaaatataattctttatgatgggcgactatgtcttgtaggaatggtatcgcatttgtttttaccatcaatatctaaagaagaggcataatgaattacagctgaagagtgctataaccaatgaataatacaaattattaccatgacttgttatttatgcctgggttttcctcttacaggacaatacactagacatgcactctcctctcctgaataaaagtagtgcagggacagctctcatctaatgaaatctgacaaaatgccaacatttggcactttataaatgtcctaatttaagcctccctatttttatataattaggaaatatttaaaactattgcctgaggcaataaaaaatatgaatctttccaaatttatattaaaaatacaatatgcattttaaattctaaaaatagttatccaattgttttaaaagaatgtgtttatatgttcatattcaaaaatacattatgtattttttaaattctaaaaatattatttttcaatatccaattgttttaaaagatggtatatgttttatttagtattgcatcctaaatatgccactatctttattacatactttaaatttgcacaaattctggtataataatggactaaatataaaaatctaataaaccagtgtgtaccctttaataatataaaaatcatagaaattaaaacacactttctctatttttgagaaatagaaaagtaagacaaaataaacacctttggggtaatgactcaaaattactggtttagatggggtagaggaattacttcaattatgatataaagcattgtaataatgcaagccttttagaaataattatatagtgattattctcaaagataaatatacacagatgttgctagtacatttttaaaattcttaatttgaagacaacatacagaaactgcattaccagttaattggctttaggaagaagcagaaaaatcttaactgcaagtgtatttgtgaagcttctggtaagttctatggaatgaattgtgcctgcaacttaaggcagaaaaaaatgtcatttaaaaacactggaatcactcagttagatgtgccagaggcccaaaatgcttaactagtgttggacagtgctatttttaaaaaatgaataattatttataatttataacaaaagattaatataaaaagatactggaccttaattatattcttagaaaggctttcaaccaagataattttcatttaaaaaggagcatctatttcaaaacacttctcagttttttgcatatttatttacattgcaaaatataaaaaccagaaaagcaggcgacgttgtagattaaaagaccataactatttaccaattaaaaaatttagaagcaacaacacgttgaggtaactaaaaattagcaagaccaatttctctaagacatgcttgaaaatcagtctccctattttataaaccttaggtatcatctaatgataatatgtgtacatatttgaccaacagaagaatgctggatataggaataagtatcattataagcttcacatgtcaaaagaaacagacatccaaataaaaaaagataatatatgaaagcctgaacatgacacacaatggtacattttatgactaaataaaatgcttagatagaaattctttgacaggtgatacaaactctggattcctccaagtcatcatgagaatggaggaaatacttttctctttctttccctattccttttcctattttgtgtctcaaaatatttcctaaacaaatctagattctctctataatgtcctttctcctttgcatgtaatgacattgggagggattggtaattctgctgcggacttcaaataataacagagaagactttctgttgcacacttacataaaagttttagtatttgataacactgcccatgcaagtgttacttacatgttacttatttctatatccatcattcttctgttggtcaagtgttatcctctcactctaaataaattttttatttagctgcatagaatctttatattttatatttgtttccttagtactaaatgtgatttacttgaccatgaaactactatttggaaatcctagaatgaaaacagatctgtttgttacccacttgaactgagtggggagactgagttatagctatactcgctaagtggttacaataacttggagcaagataaacattaaaaattaattttccttgggaagttatagctgagtgtggagatagctacatgtgtgtatcccctccctcccagtcattcattccccttctccaagctgtatatgctaatttttttggaggagaaattgggaactgttaaacttgcagttagacaaattattttaaagttgggcattttctaaagtctaattgggccaatcccacttttagttttgcacttattatcactgaaaatagctatgtatattattcacacacagccaaacgtatgtatgatgtgtatacaaggggaaaaaacttttttttggtaataaggccatgcctttttttaaaaaaaaatactgcgtgttgtaggaggtatgaacccgaacaatgtcgtttaagttctctaggactttgagggtaaacataattgagattaaaatactgacgtgctcacatttagtagagagataagaataattcatcgggagctattctagtctcactggtaatcacataattcaacagggtttttagagaatacctgaagctatcgtcgtctgttgtgcaattacataattagtcaggatctctgtaataaaatcttttctaaatgtatgtgggttactactaagtaaatgttagggctagtgttatatttttacttttaatacttgtataacaatttaaactgttaaacattatttcccgacataactacagatacttaacatgaaaagaattgcattactcaaaaactaagaaaaaaaaaatccccctacatatatttgtttccaaaatgctgatcaaaactgcttgctttatgaacattaactcactatccaatctcctctagagtgtttacttctgggaactccggggttgtattatctctttggtgttggttgtttcacccacttctaaattactgatctatttttttgatattcgcgtgactacctatcaatataagtcaaagtgcgctctttctggtccttttgctttaatgataacgctgcgcagccaggaacatttcgggagtcctcctacacggaaacaaacgtggcctggcgaagttgaagccagcaacgtggcgggaagtgaggaagtaacagcaattccttattctttatcattattgttgttttagagtctttccgcggcgttttcggccgggttcctgctccagaaggccggcgaggggccccttgcccgcggcgcgccgcagacacacggtcgggaagcacaaaggcgcgcggagcctgggcagcagcccccgagacggtcacgccctcgccgctctccggccccatgcggccgcacaaagaccagagccccaccgctacccacgcacccacccacgctcgagaggggcgccgcgcggcgcaggccgccacacccactcgggcccgctcccgcctcccgggtcccgggcgccctgatgaatatgcatcgcggcgcgcccgcccccggctcctcctttcggtttccttcccgccgccaggcggaagcgaagagccgcgcttcccgcgcgcccaggccggccgtggtagggtggggcggggcgggccgcgagccggagaaagagaaagccagggaggcgactgcaggaggagcgcgggccgggcgcggaagggtgcgctgctgggtggcggttccggggcagccccgccgcgggccaggccaatccgagggcggggaaggggcgatcgcgcgaccccggggccgtgccggctgcatctgaccggcgcagccccactcctggagcagccccgctaaaacaacaataaaacccaccacacacacacatacatgcacacacgcacacgcgggcgcacacacacacaccatcctggacggcgttcaagtcaagcacgagaaacagccttctgcaagggagaggaaagaaagctggaaatccagacagactgaagggctgcctgcttttagacttgactttgaccgccttttcttctcgggccaagaactgtggcagtgcagaaattacaattaaaaaatacataagactactcccggattgcttttttttttttttttttttttttttaactaaacacaaaaagcgacaccaaaacaacccctgagaaaatccacaaatctgtacctgagacacgtcaagtcagcggcccagggttctgttacagactcaagatctcttttatttaatgcaatacagtgcgatggtatgtggctttgaactgatgggttttgtttgcttcttttattcgttctttgcaccccctcctatccctggcacagtttttcttttcctgtttgtggattgcaaagtggctgttttacccctttcctaaatgtcatttttgttttacaggttgtgggctatagtgctgcatttgcagaactaatttgcaaatatgcattattatttagcgttggcaactttagtacatgtgacacactcttatgacgggaatcagtgagtaacattgtggtccaaacggtgcagaatctagcattttgttctgctttaactctctgctttatgcccctctcccctcagtggtggaaaaaaattactgttcaaatgatactttagttctaccttgtaggccattctctcctcttgaagcattcttttctccattttaattcacagatattctcatttaaaaatacatttttaagtgaaagaagtactatttaactctgattggtgtgttggaatgtttaaagtcagtattcattctaaagtttagtcctaacccccatcccctcatccctgaatttgtggcatcctattgttagcctttcttccgcaccccccaccaactttttaaaaccgattttgatggatttctttccactcctgttaatagtttccccccaaccccgctatttttgctgccgatttttttcctcttcctatgtgtgtctctatctctcgttctccttgtcttcttttccccaatacgtctgagacacattttaatgcacaatatcccatccattaagttgtggttgaatgtgaagtgtgtgaggacttggcagctttcagattgaagggggcggggaagccagtttcgactttgacacaagatgctgaagtggcgtgatcagaattattattagggctgtgaacatggccatcttctgctcgggttggaagaactgccactgaacttgagacaggacagacaagatctctaagtatttttcccccaccccccaagtacagtagctggcagggaaaaggcgccaaaatacacaagattaactctgactttctttgaacggatcttatagcaccatccttgtaactttaacttccaataggcgggaaaaagttaacttttgatcccacacttgaacagacatttaaatcagccctaaaatggaataagtccagaaagtaacacacgcatgcttatgtggttagaaaagaatgcacgtgtaaataagcagggtgtatgtgtgtatatgactgaggagttcaagatttaatcaaaatcagaattagtgtgactttccagtgtatttacaatatgaagaaaagcattgtgaggcaaagaaactgacctttaagcatcctaagtaaaaactgcaaagagtttgtgaaacacaaaacgttgtggtttccagttttacatttgaggtttgatgttttcatttaatggtatgagagatggagaaagctctagcgctgaaaagtccctattaaatcatatgtgggcaaaggtcaagcactccaactcactgacgcaatatactacagattcctgcctaagtgatgaggaacacaggaaaaagtactttggcaataaaattattagaacagtaattatcatcggtggttgggactgcattcttgtgcactgggaaaacgtttttactggccctgatgaattttaaagccaagtattgttgaaagctattttaataggaaattgattagctgagtgttccatacaagaaatggtgacggtttcattgtttgaggtccaaaataaatttttattctttagcagacataggcatccctttaattttaatatggtcagactgaacagcagcataattttgagtgaatgtgatgtcatgaacatctgtaactttgtttttggagtttttgacattacacaatttgataatattactgctttgaaatttattggcttgtgtagttaaaatttcagatacactcagagataaagtttactgaacatatattttgtttaggcccaattgtttgtgttttttctttgtaattacaaaattgtttcttaaattttaatttgaaaattaaaatgcacaattctgttgttatgcattgctttgactttgaaattttgttgttatgcattgttatgcagttttcaaagaagaaatgagagaaaggggtgcagaaagtttgagttgctctgccatgcactttttatacttaatacagaatgtaaagactacttagccattttggacagagctttctatacctgtcttaaaaacccatctgttttcctatgttacaaggcatgtgtatatgggtaatagaagccagtttacctgtagaaataaaatggtcatatagttttactttataggtcagctattttgaaaaagagcaataactgcaactctctcaatatcagcagacaagagacactgtgtgagagagtatatggaacctttgtaacattgtggataagtgaggcaactattacctctattttcaaagtttaaaatacatcatgcaaaagttacagggcaactgctgactttgtaatctgtgaagcaagtgtcttacagtgttgggaatctctgttgatgcactggcctcatctctgttgagaagtgaaaaccggataaccttagtggaggaatctggctcagttggtgttgagatcagaactgtattataacttgtaaatatgctagaaatgtagacacacttagtgggatgctttttttttttttttaaacagtggagtagaggcatttcggcagtgacattattaacagcgtcatttttctcatttacttttgtcctcaggggacaccaaatagctcccagaggaggagaaaaaggtccaaggttatttattcatttcagtgcaaagggctagcaatgggggtggggaaactaaccagttgtgaattctctggtggggaaaaaattactaccctaatttgacagtagtacgttaagggctgggtatgattttgttttttgtttaagagtagtagacagtagtagtagtactcagtagtagtttaagagctgggtaatttgattacctgagctggtaaaattgattttgcaattctcatcaagtacaggcactttcaatacttcttgattgtttatatatgcatttatgagtggatttttggtgttcctccttgtggatataaatttgtgttttccagactacacatgtatgatttttgtggttcatttggaaaaaggaaagatcccagggcatggtgcagtagatacttgcagttttgcaggcctgctttctggggtcaggaggtcatctgtctcttttgcatttagtttttaaatattgatattggtgatgcagccagggtgtgtagaatagttgaaccttcttgcaaaccacatgcaagagccaaaaaaaaaaaaaaaaaaaaaaaaaggcatcgagtgtattggaaatgacagctttgttaagttccaagaaatctttcatgaaactgcccaggatttgcaacctgtcgctgcaatttctttaggaaggaaaaggttaaaagaaaaacaatattagatacttgagatgtcaagctcctctctggagatccgtagtgaaaggctcaaatgtggtagcgttgcttatttcaaatatacaactgggttttgaaaaatccagtgagctgaagcactggcattctatttagaaatcaataaactttctgttagttagaaaggaaacttttttttttcccttataaggcagcaaggagatctagggaggagatctttaagaatactgaaataacagagtttcctgttgctgagagaatcattcacttctttctgcctcctcagccaggttttggggtgaatgaaagtggcctgtcacaccagtgcttttaaccctctcagtgtgggagggagagatgaagagtttaggattggtaagtaccaaagtttaagaagtgtttggcccattttgatactatcagaagcttttcagagatatttccactcttaataccacgacacagacgtgctagaaaaaatggaaagtgaatacaatgcaggcactttctcagttcctccttctacctgggatttaaaagattgagattttcaaaccaaaggtggtggacaagtgttgtgttaagagaagccaggcatcccatgcaccgaaatccaccagtccctctttccaaacaactccctagagttcttccagggaaggcctgcaatgaccttggcattggctggacaagaagaagtgttttggggggtgtcagccattctccacatggctgcaaggcctgagaagacagtcaaagccatagaaactgagcacccccataaaccttctttttcaggaagtctctgttgctcactcttcattcctttttggttttcctcgcctcaccatactcctatctcattttcctttttctgggaaacaaatcaaaaccaaaaactatcaagcatcctctatggtcatcaaagtgcaaccagccataagcaccctcaaacgtggggcaattgaaagagatttgaacccctaagtgatgggcctgggaggccccagacgtcttcacttctctggggtcttacctggatctgacgctgcttcttcgcccttggtgttgctgaagcttttgtgggctcttctgtgtaatacttgtcaatttttcgtttttcttttttaagcttgtgaaaaacttttggatgcaacctagttttggtggcagaaggaaatggtttctgttgggaaagggaaactaataaagggaggaggggtagcgatgtcgggagacacttgcccagggctcagccctgggcctctttttgccaggggacaacggctggttctgggctctcaggctgaaaggagtgctctctgggtgccaggatttcactgggggtggtgtggtgaggagggagggaagaagggagggagggagagaaggagagatgggcgctcgatttttaaagagaccccgaaataatggcttctatgagagtccaggcattcaaagaggtgtgttcaaggatattagtgcattcctgccaaggggaatgtcttttatggtaaattaactccagttaaattgaatatttgttcaaagggaaactgcagtagttaaagctggtattatcagtagagcttccccaccccctcccctcagaatctggtgagggtgagaaaggggatgcagtgtaatgtgcaatacaaagtgatgctttcgtgctggtggtttctctgtgtgtgtgtgtctgtgtgtgtttaatctaagatgaggttgcctaaaatttctgagagaaatgagtatttacttggattaaccctgtcacctcatttctttcatccataaagactgccaactttatcccagcttttcaaaaagaagaaatgacccgcacaaaggaaattaacgttgtcagaacgctgactccaggatttgccggggcaggggcggggaccgcagggaggccgctcccagggcgtgtggccgaaagggttaactcgcaggggtccgcgcgatctccccgactttacctgtcttcctagtcccagcagcccccgtccccggcctcccgaactccccaccccccagcgcctttcttctttgggctctgggtttacgggggctgcagctggtaaacttggcaagctcgcctcattaagagcgctctttgaaaacggactgtgtttgagcatttccctaatgaggacaggacggggttaaaaagtgaccatttcatggttgacttgaacctgcctacttttcttgatgtgtcgttgtgaaatgcttgatgtggataactcccacttggtgaaggaaaaagtcactggttcctccaggtccgctgggggagggaagaggggacggtggacagaaaccagagggagtgagaggggctaaagttgaggggacagatcacgagctgggaagcggtggaaagaggaccggggaatcgggggcgagcctcgaaacgccccagcagtacccgtggaagcggggcggccccgccctggggatgggcccgcgaggacccggtagccccagcgccccccggatcccccagctaggtagactcggagccccaggcgctcacttttcctccctccattgtctgggaggcctttgcttccccctcgtccccatccaccccaagcagaaaactggatttggggggcggtgtgtgtatgtgggcggggggtgcagaaagggtgcaaggcgaaccgccttcttcaaaatccctggaatcaagttcattcactcggagcctgcacgggcgacggggtgggggcggggcagcgccgcggtggggagccggcgcgggcgccgagcggctcagggcccgcagcctctggagggctgcagcggcgcgcgcgcgcccgccggcccgccccgcagccccgggcgcgccgcggccccgccccgcctgcacccgggcgggtagggagacgctttccgccggcgccccgggccccggggggtggggattgggagccagccagcggggctgcaggaggaggaggaggagagcgaagccgggcgcggggaggaggtggagggagcaagaggcggcggcggcggctcggcccggtcctcccgctcagagcgaggccacgtgcacggggcacccccggggagggcggcaaaccgcggcgaagcgccgcgcgccgcgactgcctcgggtgcgggcccctggtgggcagacccgggacgaacccgcaccccctccctatccgcgaacccgggctccgggcggggccgtcgggggctgggcgccgcacccccctggtccacgccggcgcgccccaactacttgagcccaagttcgctcaggtccccgcctgctcggcctcccccttttcccggcagccgcaggctccgcggactgagcccgccccgggtgcgagtgtccgcgccccagccccggcctgggggcggcctgggtgtgagggaattttccactcgttcctttctcgggctcagacggtttcggtgcttctcccactcggatgttcccgcggcttaaaagagtccgcagcgagcaccgaaatacctcttccagggcgggttttcgggggtgtgtatgtgtgtgctggtgtggggagggcagcggaaagaagagctattttggaaaaaaaaaaaaagtcatggttctgtagcaccggtaggatacctttaacaaatgagggagaggtggggggagagaaggagaaggaggaggaggaggaaggtgggggggcggggggtgtggagaggctggtgcaaaaggaatgcgcgtttgcaggaggaggagtaaagcgatgattgtgtaattaaataataaaacaatccttaagtctgatttggagagagctcgagcggggtccagagggtggaaccggtgaatttttcaacttccaagttttgcaacgaaagaaagcaagagagggagggaaaaaaaagagcctagagcagaaaagagaggagtttggagccgagcgggagagcgggatttatcgtttggaatttttcaggagatcgttttgatacccctgggctctgggcagcggcggcaacagcagcctccacgctcggccgggtcagacgcggggcgaggcgggcgggcgggcggccgggcgccgaagacccggcgcgggcggcggcggctgctgctgccggggaccacgcgccgcgagcctcttccgccccagagatcagcgctcgcgccccctccctcaccccggcctctcccttctcccccatcccaccccgcccccaccccggccctctcccgcgcgcgccccgccacccgcgcgcactcgctcacgctgcccctcgcgcacacacatggtcggctcgcggcaaagtttcgcctgcgatcaccactccgggatcctgccgcagtgcttggggctgtaaccttgaactttcccagcgcggtgacacattctccccgctctccctcccgcccgcccgctcgccctcctgcgccctcccgcgcccccctccccgccttttttgaaaaagcattttaccaccaaccaccaccccaatccaacccacaccgaaccttcgcgcaccccctacaccccaacaacaacaacaactgcaaaatagaaaacaaatccccaaacccaggcgaaaagcagccaacaccggcggcggcggcggcctcggcaagcacggccagcgcgctcggactgcaagagggttaaaagtgtagattggatttcacccctggaaatctagcacgccgagtgaacttgaatctttggctatttaaggaggactgggtttgttgtgaagttgcggtgatccagcgcagagccccgtcctgattgatcgcatcgcggggctcagatgactgtaaaatgaatagatgaaattcttgcttctcgaagattttcttgggcatctcccggaaagtgcgttttaaggcgaagtcatgatgtattctcccatctgtctcactcaggtacatgtctcggtcgctttctcgagctttctctctggcccgaaatgcctttgttttgttttgttgcggacaattagcggcttgagttaacctccgcacatccccgtcccttggagaagtggcccggagttgcagcgggcgtcgcggggcggcgtgggagccgggagcggcccctcgccacggccactgcgagcgcccagccccgcgccctgggcacggagcgcgggcgctgggccgggcaaggccgccggggggtgggcagggccgggacctgtaagtgcgaggccccgtgcggcccctcaagtgcccgttgtggtgcggcatccccgcccggggtgcccgtagcccctctcagcagctcgcgcgttgaggtggactcgggctttggaggactttacgggggactaagcttttaaaaacagccagtgaacttgggcgaggggactgtagcacgagtctgtgtgggcgccgctggactgcgctgcaggcggtgggcgggcgacgaatcgagtcggaggttgtggtccggggacccattcctttgctttatttggggatctgaaaccctggtccatagtgacctgctgcactttggggtttctagtgaccgcaccacaaaggcagtatttacgttgacacgagttagttggtcttggtgattgttaaggagtttttagaacgtgttccttttgtggaaacctgttcatttgacgatatttgggcgtagctcgtaaggcattttaagtaatgctggtagaagtaaggtcatttttttcgactttgagaattgtcctaagaccttaggaataatgttatgaaataaaacactggttttatactttttagaaacacgatttgtatcactttaagccagacggtcaaatagaaaagcggcgagacccaacagacttacctgggggcagttttcatcgctgcccagggaactaacaactgacaaagtaactaaaatatcttagcccagaactgttatttgaggcagtattttaaacctctaaaggtatggggcagcttatttcagcttttcggaagatgtgtcaccattggtaattgataactattttctttgacattgccatgaaaactagtcatataaagaagtgtcagccagtcttgggcgtgttaaaattttaaaaacatctaatatcacgatgatgcatttttataatggacaaataattaagatttcaattgtatgacaattagaagccattgtgattcaaaaggactgaggcattcataaattgtgaatgaagatgaaaacaatgataaggcttattcagtgattggatacagtcctgtagctttttggctgacacattttttattgtttatattttgtttggcatctgagtatgattaacttagatatggctattttcagcaagtaaacacgcactttaatttaacaaaactggaaaaatgagttgctgagctatttgtattttaaaagccatgaatgataatagccaataaatatgatgaaactgtttcaggtataacgaattgcctttacttgtaaaagttaccattaatattacccatcggctggatatatttttctctttctgataagctgtgttaacttgatattatttttacaccgtgatcaaataaaacaaatcaaagcaagattttcacttacagagtatagcatcacttattctcacctgtaaaagattgaataattgtgcatttctctatatttctaacatcagcttttcagaaacattgctagcaattacattgcatttttagtatcctccaaatatgtattgaaaagtcactagttttatcttaatttgtgtaagttaaagataatattgcagcattgagacagggaatgttgggatcatatacagcataatcattcagctatcacattagtattcagagatacacacttaacaacaataacttgtgatgactaatattctctactattttaataatataaatctaggcttatgtattaaaacaaggcctacaccagggaaggaatttcagcttaagaattttcacttcactaagctccatgtgactttgcaggtaatataggtgttataaaagtgaggccacattaatagtgtcacttttgtatcagatcagtagttttgtatcacaagagcctagtagctgtagaaaaacatgtctcaggacatgtaaattgcaaaatagagtatcattcttaattggttataaacttttaaaagtatctcaattgttgcaataaggtatctaggttttagaaaaaaaatcttaatttaaaaggacctaccattaaatgttatgtttagcaaaatagtatgctacaaaatcagcatatcaataaccaatatttatacaccagtataaatcagatataaaggaaaaattaagaactatcatatgatttaatatatgtttaaaaataatgtaaaccattaataatataactttcaattggcatgatggcattaaatatatttttctttcgttgcttttaagttctttaggtacattttttgcatgatttgttgttatatagcaatgcgccaagagcacctagtatttactcttctacctctatgttggtctaaattatccatccctttcatggaaacggaagaaaaataaatatgcctagtggaattaagactctttatttttatatctgaaattggtaactttgttatttactttgtcaatttagttcaactaaaggaagttttaaaagagaattactgaacatcaatgcattttactaaaaattctgaaagagcaaagttgcctattacctttgtatacagttgtttggttttaaatcacttatatgttttgctttttttaaagaatttatgattgcttaatgctattgtaataatccactactagttaggatatttgaaaaccttaatcaccttttaaaaaaatatttttgtatcaggacagttattatgttccatattcatgtcactcataatctttaagactctagtgttactcagcattaggaaacagtcacacttgggagatgacatttaggcatgttaatacagaaatatatgcgacttacagcaaacctcaatttacagtcatttttggaggatatgtccccttgtcaaataagtgcttcacttgaattcacataatagtgaaaccctgaacgatatcaataaggcaaactggcagcctgagaaagtttgctacttttatttctcaaaaaaaagagcatgttttaaaacaatattggcagcattgacagcaaagtcaaaggaacgtttaaaaactgtgtgcatttgctaagaattttcaaattcaaccttcaaatttgaattttggttgtttaaaataactcattaaaattttgagctttcttgtgtgatagattatatttataatcaaatattgaaactcaaatttaatcaaaactgtgtttgatgtctttataagaaaatgaaatgtcactgaacatagtacttaaggtgtaagtacttacgtgttaccacatggcttaatatttataaaataatattgcattttaaaaagcatggcaagggtaaaatgagtgagacagagcccacccactccacctcatgtgctctttacattctcaaggttttagttttgtgagtgcatatatgtgtgttttttagtcatatcaataaatcgtagtaaaagattataggaagtgagtttccaaagcacatttaagtccacatttccttgagcaggctttccttttgcatatattcctaaaggggataaacaaagtttttgtagttacagtgaaagctaaaagcatggcatcagaaagtgtatggagatagggaggtcttatcatgggatgtggttgctgtgagcagggctgccttcccacacaaagaacagattgtggtttaactctttccatggcctagtttaatgtgctcgcatagtaactgaattgttcaaatctctgctggaaactactgatcggtttaatgatttcctctatggcatttgggtatgcctcatgctgtgatgtaatcatcagcattctgtattgttataaaattttgattcatacttattctggtgaaggaacacttacagcaatgttagaacacttgataactacattattgattggatgggacatgtactccttccatatctgaagtgcaaacagctaacatgttgcagtctgtagcattaaaacttcgaatttcttcttcaaaatgtattcatatctatattggatttttgacaccttctttgttaaagagtcattagttgtactttcatcatatttacctaatggaattaattagtcagtctgctgttaaatagaatttattccacgtagttcagggtgattaacatgagtatgtaaattctaacttgggatacaatcagagagttattttgtcgttgggctgacagtatagtcaatatgatcagaaaagtggtggtggtggaagttctcatttgcttcaaatcttggcttattgcgtacatgcggtgtgcatgtacaggacgttaagctctttctctttgaacagtaataggcctaagcttataagacaggttttacctaaatcaggaagtaacgaaactgactgcactgggaagtaacttgaaatatctgtaggtaaagattatccaccattcctcactgatcccctcccttaaaaaaagggcttggatgaaacaggcaggaaaaatgcaggagcctaaaggtaaactacttaattcaaaagattggtactctataatctatgtatctgcaaattcacatgcacatgcatatatgcacccacagttctaactgataattcatctacatggcaaatgaattgtatagattccacaaaagcagtaactgaccagcagtgtcaccccaccacagcatgcagagacacaaagaatgtaaagttggtgccaagttgccatttttcattgttcacctcagattgatttttaagaggtttagaataattgctatactcatgtgatcggtgaacaaattaacggactctgtggggctgcatattctatagggaagctgatggaagaacattcatgtaatttttgttttccagtttgaaaacttctatttaaaaatgcaagagtgtgtgtgagaaagcaggagagtgcaagtgtgtgtgtgtgtgtgttgggagctggcgttggtagtgtggggagagaatgcactgctcaaagtatggaaaccttctgttcaggacactgatacgacgagctgtgtcctttgcccactttccctcactgtataccggtttctctagttaccacttttggaatggtgctgtttcagtgttggaatgttggacgtttgataagaaaatggatcaagtttaatggcgcatgctctttgtgccaccagcagcctcttgctgagagcatgctccaaaagcgggaactgtgtggcattacactgagcatctatatgctttgtgtttctgtgccacagagaagagaaatgaactgtggcatcgctcctgccttctgaacagctctactccgattaaaaaaaaaaaatctcactgtgttctttgtaaaatggtactgcatagtgttagttggtcaatcaaatattgaaatactatattaggtgccaagcaccttagttagttgcctatattttaaagaatgtagaatgcatggcattggggtggaaacaagggggatggggccagagtgtaatacaaaatataaaccttatttcctttataggagggagaattgacctgtgaattttggtggaaaggggacagctgggcatactttactttcttcttgtcctgttattttgataattttaaataagaaaggaatgttattttcatgtataactttttgtactgaattggaaacgggttgtggtcttcttttcttattttttgagcttttaaaattaaactgactatgcacatcttttcctcacccctctgtcttccacaggatgaatttcacccattcatcgaggcacttcttccacatgtccgtgcaattgcctatacttggttcaacctgcaggctcgaaaacgcaagtactttaaaaagcatgagaagcgaatgtcaaaggatgaagaaagagcagtcaaagatgagcttctcagtgaaaagcctgaaatcaaacagaagtgggcatccaggctccttgccaaactgcgcaaagatattcgccaggagtatcgagaggactttgtgctcaccgtgactggcaagaagcacccgtgctgtgtcttatccaatcccgaccagaagggtaagattaggagaatcgactgcctgcgacaggcagacaaagtctggcgtctggatctagtcatggtgatcctgttcaaaggcatccccttggaaagtaccgatggagagcggctcatgaaatccccacattgcacaaacccagcactttgtgtccagccacatcatatcacagtatcagttaaggagcttgatttgtttttggcatactacgtgcaggagcaaggtaggagcagattgttcttttttctagcacggcaaacaccgcctacaaatctccgtagacagagtatctggcttgagttagatggtcctcaaggcccctagatatcctccaccctctctgggtatagtagggtgtccgctttcactcacatgtccgctgccatgtgcgagccatgtaaatagacacagagctttcgtacctggataggcttggatatttaagaaagaccacaaagaggtgcgttttcaagtatctttaaaataatactgtttttcaaagacatagggtagtctaacaaatatagttcattacactatactttctgtcgtaggctacatttttgcatctaatctagtaatcttttcctgatttgaaaatataactttatttatgaatagccaaaccatcctagataatttttgtattaaccttattaattaatgaggtagagggactttgtttatgaacttagtggtatcgcactgaaaatagaactaatgtttactattacaaaatgcttaagatagataatatcaaaagtatatcttacgtagacctagatttacttaattttaatatttctatcatcacttttgattgtgcaatattcactgtcgattaaatggaattgagttattatttaaattatttatagtatgttcccagagttacttgggaacacttaataatgttagtttacttgtatgtaaattcataaaacttaccgaggaggaaagtcgcagcgctgcttacagaacaaaaaacagaaagtggactggttacactggtttaagataaatcttaaaaagaatacagaaactgcataccatacctattatttaaaatacctgagaaggagaatggtatacattttacctaaataattaaaaaagatgatgttattactgaatatttgagttaatgaaatgtttattatttttatttttcttaatatattttccttaagtaggtaagaatttcttttcttcaaataaatgcatcaagatatagatgtccttgcattaccaacaatccatagtaaaacaatcattttacaaagccgcataccaaaagtagactgaagtttgagctgtcacagatggtaggtcatttccaaacttggcctggtgggaggaaaaatggcctgcagatagccaggtgacagactgttacctgaggtttgttatataaatgtgggacttaataaactgctatgagctttattattcaaaaaaatcaaaattacttttttgactctgaattctaggccctcactatgtgctttttgtcttgattttcttgtagctttggagataggcttaagtgtcattttagaatttttagtctgattttaaataatggtgttggacattgcacttttagaaatattaccttttcctgaaaaaatgaaacattgcatttaatatttccatgcatttaagaattacagtccaaataatgatggtttggggaaaataatatttttgtcccatgtgtcctaaaataaaactcagtaacacatgacacttatttgattgacagatgtctaggaggtgacactttaaggtgggctgtatatatgtgttggattgactataaatgtgttgtaactgtgttgtgaaagtcaaggatggaagtaaagtttcaaaaagtgggtcatgtaactttttagtgcagggagggaagatttgcaaccacttcactactgctcacattttaagttgcttgaaggctaggttttgaggtgtgcctgcctgcatgcacatttactcctggggaaggcagccagctctcttagttttgatgaactgacaataaagatttgtagagatagattgaaaaaagaaaaaaaacgcataaatgccttccatgttgcaccactggtcatgataactataaagttttaagcaactcttaagagaccatggttttagataaaacattgattttgttgttggttcaacaatctctattgtaagaacttttcattattttatcttgtgtatataacttgtatcctctgctacctgccagtgcatcatcttctcttaacatctgttggttcttcctttgaaaaactcacgtcaggatgcttttgtgttttccccttttcaaaatttatatattcttctttgtcaagtgtaggttaattatgtcattttatagtgcaattgattaaagaaggcagattttaaaagataattctccggtcagttagagggctgcatatcgcgagtgatgactttttatttgtcttctaagtacatgataactcacctaagtctgttttataaatcaggaaaagaagtataaaggaaaacacgaaagaaaaatcagaaaagagaaatgtaatgtttgcagcagaaagagcaacaaaattacgtttccccctttttctctctccccacttctaaatgactgggagaaaaacatgagaaagaacagagagaatgccaaagatggttgccactggcaccaggattggcatcagaccctctttgtttagctcaggatgcctgtgatttgttagttggcatccgcattgcagtgtggagtgatgttacaatatattgacaatttccagatctagaaatgtcaatagtcctcttggttatttatacaagatcacacactgcatctcttctggaagacgaaataaagaccaacatgtactaaagtttcattgttgaccaacttcctatgcttttcttttttccctctttctcttttggttcaacccacactttttttccttcttcatgcccagcagcctcatctttctgaaatgtgggaagagttaccagagctttgacacaagctatagtgctacatctgcatctgatatggtttgggaaaaaatttatgctttttgaaatcatttttgatatatagttcattagacttttgcatcacgtggccatgaggcagtattttatttaaagctaaatctctttgttattcggctactatgcatgtagtctggttgaccgcaattcagtccattttgctatttccttatattagcaaaggctgatgttcaatatagttgtttataaaattaaatgtctccctgcacttcacctaaaatgtacacatcatttgggagtaactgcgtttaaatccataaagtcatttgatgttattgattcagagggctgcgcttcggctgtttcgttgctacaagaaccgccattttgtttgtgaagtgccaggcgagggggaaaaaaaaggcagacactgtgtttgatgccaataatggttgccagtggcaccgaggttggcatcagaccctctttgtctagttgctgaatgcctttgattcgttggttggcatccgcattgcagtgggcacactggaaagtttttgacaatccctgaatgaaagctgcttgcttgtttgctgcagcaaatcttagctaatataaaactcttcctttttttaggttttgtctaaaaaaactgggacagattaaagaaaaaatagctctaaatggtatctattttcccaaagatattaaagacgtccaatgattcttgggcaggtgttacctattccccatattgcctttgttactgcattcatgaaagcaaagcaaaaacaaaaccaaacaaaaaccaggcaagccttgcacagcacagcttcctgggatgtaagtgtcctataggatgcagggtgtgctatgacaagtgtgtggaggacaaacctaacgtaatgatatgtgatgcattcattatgactgactgttgctctcagtcacatcactgcttatttgctatgcaatttctagttccctcacttgccactcttgcaaattttatagtaacattttgagaggacttcagttttcctctctagttagaaatgtgtaacagaatacatgtttaaaaagagagagagaaaactttaaagaggagacctatgcgttaaggtctgaggtaaaatcagtcattctggaatttctcgattctgcaccacactgttacgaaattctcagtgcacaattttgtacactgggaaaatcaaccaaaagcctaaaataattttggttaaagtttcctagatagttagcgttaatattgcttttcagttaaccaccgttatctcgttaattaataagaaggattagcagttctacccaaagggctgcacagaaggaagtctggcctatgggaggccttgagttgccagactgtgtcctgtctgaaggggaaaaaaggaagggggtggtggtggtggtgggagtcggggggcgggagtgggattggcctttctctgaggcaggaaagcgttttgaagagagaggtcacaacacaccaagacatttaaagatctcaagagatagcaactgttgtcgtgtatgtaacagattagagtttaaaatgagtcaccctaactgatttttggactgtactttgcactcttattaaacatgttttggagtgttaaagagagcccagaaacctcattgctatcctgaaaaagtagtttcctttagccttgttgaacccttaaaattatgatctcttgttgggtggccacttttgttgctttattgttaaatgttataataattgaagtacattttgaagttgtgaaaaatgtgacttatttacaggggaagtcataatcattattactgtttttgaaatagaagccttcctggttgtcacatatcattagtgaggaagcaaatgctaagaattattttcttcctacagttactgaatttcagaatccttttgggtaacaattatttctttatgaaaagcttaagtagataattgtttgcaagttggcagtgtattttaacattttaatagatttcacttcatctgcaggtatttcccattatgggaaaaaataagctttcataattgattaaaatgaggctgctctctaggatgatttggtgtgtctgcactgtgaaatgctctgggaacataagagtttgtgtgtaggagaaatacttggtatgcatgtttgatttaggggagcactgttaagttttcccatctagcaacttgtccttgactgaacttgtgaactctagtgcacatttgtttgcattctggctcatacacaattcacaagataaagaagggctcttattggcatgtcttgctcctaggcttaatgagacctttgtgggaacatatattgtgagataagatacttagcaattttctcactgataagaaaacacagtctcccaccagaagttcaccctctatgccatgaggtctctgccacaagatagctttaacagacaatttaagagttaaactctgaggccccagttgccagctggggaagcttggcatctgtgttccgatatggcaaactaagctcttgcattgcagttaatatgatctcatttttcaaagggaagggtggggggagagaaggagagagggagggagggatgggacgcttatttgttacatcaattatgattttcaaatatttaaaaatatatagtgccccactttctggaggcagcaaaggttggtaaaatattctactgacagcattaggcatccttccccccaccctgtatatacagcactacaaattttgtaatgaaaaatagttagattatgtatttggatttacagatttagtgcacaatgtctcttgtgtggtaaaataattccaaatatctccatatttgtaagaaccaaaataatatgcattgttcgagaatcgtggtaattggagaggactgtgcattgcagtgacaggagtgacggtcaggtctcctgaagaatgccttcctgataggcacagttatagtgcctgtgcctggagacttaaagctgggtaggagccattgagagaggccatctattgctacagctttagttctttaaagttactgttttctaaggtggtacctaagaagcacttccaaacatgaagattcgtaatagatttggtaggatttttcatttacttacttgtttttccctaaatttggaatttaggaagaagctgtcataaggaagttaaagttgtaatcctccattaactttttgcttttgaatttggcacttaaaatttgaaacagcaatccaagatacccaatatagcaaggtctttctcctcataagctctcactcagccagattaaactgaaaaactagactggtaggctatataaaaccgtttgctttctgacactagcgctcttgccatcactgctggccagttagaatttcagcacctgaagagagagggacccaacggaaggttatgtcagaattcacaggatttcttaaaaattgagataagttagttttcatttctgttatcatggtggcttacatgataatggacttataatcaaagaagtagttattgctttgtttgaagctccaagtttgcaaagagtgcaaagagcacatgaaacactcattaaaatggtcaattattaaatacctgaaaattatgggcaaaggcgatccctggctctgaaactagcttctgggtaaatgtttctctttggtttatgaaagaatagcattttccagtttgaagttgatgaaagtagaacttgcggcacttaaggggttttcctatgtatgtgctatggcggagcaaatgattagccaacataatgttcaaagcaaattttccagcctttttccctccatccttgtgaaggaggaataattttagaaatctcaaggactagtggttatgcgatcggaaacttgagttattacggctgcatgccccagtgccaagcatagcaagaagagacgcttccttctgatcatgctcacttttctgtggcaacgtggtatgttgtctcattttaaagtaaattcttgggaccttgaactccagttttgtgatgcggttaatttaactgaatttagttgttagaatttggcatagagaataaatcatcaaactgcagagaacttgtgaaaactaagtgcgttgtagtaaggagtgagtctgtgggattagcttgtattagattgaacgttagagtgagactaataggacttgaatggttgggctttttggttgttatattattcagaaaattggaagaaatggctaacaagtgaggtggaaagtccttgaggctgaattgaaagccacacatttttaaaaaaccttcaaaatttaattgttctaaaatgggaaagcagatgattacatgcataactatattgtttatagtaaaacacttagatacacatattctgtttatgatgatagcttaaacaggacagcactgatgaatcactgacaaattaaagatctctgaacaaggactatataattaaaaatatggggtgatggatgaagtaattttactatcaaaagttgcctggaggttgtgtattttcagaatcctattttaaggcagttcagaacatgtagtaagttattgatgaagcataaaccagttgaaaatggaatttgtttaaacaagtgcgaaataaaataagaattacctttaagaaaagaattatttcatgttaaatacatgcagttttaaaattttagttagcttcaactccattcaaaatagtctatttctcaaaatagtcaacttaatagtattcattgaattttgaagtacacatctctcataaaactacataaaagcatttaacaagcatccattaatattaagcgacacatatatagtctcatgctgaatgaagatgaactgtttttttaaaaacctgatttttcatactcattttgaaaaaaatacatggataaatgtattggtgctaacggaatggtagagcttgggacaaaaaatctaatcatgagcacagatattaggaaaaagttatttgaagtagggtatattctgtaattcatgtgagtggtggattacatttatgcctatgctaatgacacgtcaatatgaagtctatacccctctattagtgaattctgaagtgtaaaaaatgttccttcgtaggacaacttgtattttattattctgacatctgcagtttctggttggattaccttaaatttgctatgctatgttaaaagccttgttttatgaggtcggtctcagcttctggccttggtgtcaggaaccctgctacctgatgcaacttgccttgttaggtttaattgaccaaagctgatgtgttaaaacaattcatttgcgctgtaacttacgccctggctaagttgctacctgaatcccttgaccttgacttgtttgggtcatggaatggctgcaagctgtttgacctttctattgtgtaataatgtcactgtttcctcttattctttaatggtaatagctgacaaaaaggcccaagcccgccctttacacaccagtggattcaaggcgtccgtctgcagtagctacgtcttctgtttgacatggtctggctgtagaagtgactttcttttgtttgctgacagtgatggggacaaatttgcagccctccttgctacaagaggtggggcatagtattctggcatttggagggatttagatcttttctgcttagattttcagtttctctgttttatgatggtacatatcacaatttccttttccacactcgtctgaggttgacttttcagctttttatatttatggtttctttaataattacttttcagcattttcagctgctacgataaaaatattttattgtcataatatgaggtaaaagtgggaaatttagttatgctgttggttaccgatgtgaaaacaactgacttttgaacttaacactataaatctttgactagtactgaaaaaatctgtatactaaacatgtagggtaaaaccaacatttttttctttacaaatgagttaatgttgtaactttatatataccatcttatgttatagttttaagggaatcctatcttttgtgacttaaatagctaaatttcatgacatagtagagaaccattagtaaatatgaagattttatttctgtggggacttttgccagcatgtaaaaataactatttattttaatgaatataaaaattgttttttttctactcttcatgaaaacctcatgtgcaaaaatagcgaattttacctccgttcttctcttctgaagcagtgaaataattttatttttaaaatactggaaaagccttctaaaatgttaaaacacagatatttttatcctaccaaactcttctttgccaaatatgacattatagttcatgattttcctatatttgccagattaaatatttaaaatccaagctgttacattttatttttaaattattagaggaaaaaaggaagtttaagttaaaatgtacatttccttacttgcgtgttgcgtactgtttatacatgtgtgtagatacactgacagatgagagacaatgtgctacaggcgctagaacctgggaaaaaagcagtagatttctgcattcccatctagaaaatatctgaaaatagcaggtgagaggctttcttttctttctggtttgtttgtttgtttgttactgttgtgttttaaactgtttttcccccaggaatgttcacaagatcaaggaatttaaatgcttttcagaatgaatcatgttgataatccagaatcataggggtcaaaggaggaaggttgaatgaagtgctctgaatctcattttagtccatggcctcagtttttctctcttctcctgtaaaaactagtctagaatagaaaatatctcttttgcctttctgccggttcattagcatcctcaggggcagcgccaatgtggagttggctttagatgtggttggtgggctaaggggtcagatgacagtgagactgtgatatgagaacagcagccagcccagaggatttaaaaatctctttagttttctccagacgtctacctcagttcctacatcgaaagaattttaaggtgatctcacctgttgagttaaagtttctagtccaacttgtgtgttatccaacttgggtgtgtgtgtgggcagggagcagggggtgtgcgcatgcacacacgtgttgtagggagttgaagaagtgaagttagaagaaaaagagaaaggcggggcttagatcttgcaggaattacttaagaaagatggcttattcttagactgaagagtaaataatgtgcaaattaaagtattctgtcatcctttgaattttgaattgcttaagacgttcagcatatcccccttctgccttttccatttttgtagagcacagaaaatgtcttagttcaggctactataacaaaataacataaactgtgtgacttacagacactaaagcttatttctcccagttctggaggctggaagcccaggagcagagtgccagcatagtcaagttccagcgagggctctcttccgggtggcagagtgccaacttctccttgtttccgtacatgcagcaaaagagtgagagctctctgggatctcttttataagggcactaatcctgtttatgaaagctccaatctcatgacctaattatctcccaaaggccccacctcctaataccatcagattgggggttaggatttcaacgtaggaatttggggaagacccaaacattcattttgtaacaaaaatcatgtgcatagaatttgacatttggggttctagtcttggctctgccatttatctgctttgtgaccttggtcaagtcacttcagctccatgtgctttgcttttctgttctgtaaatcgaggattaaaatgcctacttcactgtgttgctttaggattaaatgaaataattcatgtaagtaaaagcaataatgttaataatagcaattactactatatatgaaggaaaatagcataatgtagactgccagggagactatccagtagtgaaaaaaaggaatgactggatatgaagcagagggtcatcatttagttcatatttatctcaggtaacaagacataccaaagaggaaatcgaagtcctgctcactgtagtgcgcgtgaatatttgttagtgaaaactctttgtgtaggcacatgaagttagctagttgtgtgtagttttaaaacccatttaaattagaatgattgtatggttttagaagcctttttgtctcagatttaccagagactaaatttattgatcaatctaggtatatttgaagggaaggaatcaaataattttattagtggctctctgaataaataactcaattttggtgtgggtaaagggtgtcctatcaagtactcgtaattcactgcactccaataaaagtgtaaaactgtcatgtacaaaaaaattaaattgccaccatttgggagaactacacttacgttttagatttgtttcggcagaagtgatgatgatgtggctagatgggatagtgctttgtttgtttgtttgtttgtttgtttgttttttgagaaggagtctggctgggtagcccaggctggagtgcagtggcgcaatctcggctcactgtaagctccgcctcccgggttcacgccattctcctgcctcagcttgccgagtagctgggactacaggcgcccttccccacgcccggctgagttttttttttgtatgtttagtagagacggggtttcacagtgttagccaggatgatctccatctcctgacctcgtgatctgcccgccttgggcctcccaaagtgctgggattacaggcatgagccaccgcgcccggccaactggattgtccttaaaaaagcatgctgctggttttcagactctttttaaagtccgaaagtatcatatttaaaaatgacccttagttgagtcaaaacctcaaaccgtttaatcagttgcatgaattgttttgattttattgccatttaatttttctcctttaagtcactctttcccattcctccttttctatcgtgttaagaaaattaaataattaaatgagctccgtaggaaataagttaacatttattactgaaattgacttcacttttgctaagaacaactggaagccaagtggagaatggttacaacatttacttcttacgaaactgtgatttgggatcaccgtgtttgacttcagtagctctggttggttgtgtccatggaggtccttggaggaactagtttcggtgcttgtttccctacggccactgaactgcacccctcactttgcacaggaggtttggaaagtggagagattagctcatatccacaatccctactaggaaaatttaaatcacgtgtcacattgacgtagggtaaaaaggcatcatattcttatatggagcactttataataagtgtatcacgtacctaggggttctagccaggagttaataggaaaagttatttcactgtttgtccattagttaaagggtaactagggtgtacggaaagcaggatcagtacattgattagcttgtttggattctggcacataatttttaataatctgtggcattccttttctttttgataacacactggtgtttagtagcagttctgttcatgggatacacaaaactcgaaaatcatatacatgaaacaaagtgcagccacagtttttaaacatatgtaaactgggattgctgttgatggcagaaagatttgatatgatgtctttctaatgtatttgaaaagctttgcttacacttatgatttaaagttgatgttcacttaaagtgggagcgtatacatggttgttaaattctagttgcctttcatagcctctcagagatgcttgcatatttctttattcctgatggtaaagcatcaacattttaggatatgacttatagttatcatgtaacaatttctgttctatttacagtctccaaataagggaaaagctgcttatagtaatatgaggatcactggtcttacagtaattaaatagacttgttatactacattaatcccttttggaacatttggaatgacttcttagtactaacaaacacagcattagggcctacaattaatctgcttttcgtgtccaacattcgtataatataaaacatgtgcatggagaaacatattttgggtttaagatgagttcatgggaggacaagatgaaattattttggactgttgagcaatatgaatataatgccaagtactgataaaatacggaattcatttagaatcaacataggtagacagactgtttttagtaaggttttgttttttggtgaataccatgtttgggctgtcagacttacttttcccctgagatccatattttgtacatgacataccagatatatgcaatatgaaacggaaacagtttttcaatctaatatccaggagtttgtgttaatatcttgtgaacttgtggctcttggtatctggcattgataaggctgtctactaatcctagagaaagggaagtagactccgttttaaagtctagtccagtcttattctttagttcatagaaatggtctaagttaatgatagactccgcacttatgttcagaaagcatcatcattacagctttgttgaagggacttctgagtaaggattatgtttgcgtctcctgttgtggaaggcccatgaggcgtaatttcctcctcaccatgggcttctttattattgttgagtttttcatactcagggatgtgaattcaaccttgggtgttccagttacagagaaaatatttcatgaaggatgaagtgttggttcaattctaggacagattgcgtgcatatatacagagtactatggaaatgctgggattattgagtggtttgcagccattttcgaccatgtgcctgggactagctaacacattgtcagggaaaaacatgatgtagcaacaatattagatcatgcaaatgagactactgaatagtaatagttatgggcaatattttggaaaacactgattagtgacagttttattacagcaaatgtatgtatcaagtccccagatttcattgtaacgcactgaaaacagatgtcaaagtgtcccaaacagaatttcatggttaatctacatattgcatggaaagtacaaacaaaccatttagaattctgttatttaatccttttagaaggaatgaaaatatacaatttagatttactctattctttcttttaatttcagtttttgttttgtaggggatgacgataattttttttgtttattaagatgcatataggagaagacatatctgcgtatggacataattttacttaatgtactttgaaatgtaagtttctgaacataaggtctttacattaaaaaaagaaaaattagactctaaattatttagtgacctgataatggaattaccttcttccattcctttgtttactgatgtagagattcactctacgccatatagtgattgaagcagcttgctgaagtggaagagaaaaacattgctggtcctactgtttgcaggtgcttgggaaactttgtccctctcagtaactcagtttctgtatctgtcagggaagagaattggcctagaggacatccactatccctgttagctctagcatcctaggaatttggtttctggttatcttggcagagagcagtcctcttcatagtaagcaatacttaataaagtttagcacatgcttgttaaatttagggttttaatacattttatttattaaagagaaatagaaaatgtgtaacctgactcttgagtaacactttcatgttgctcatttcaaagtccaatagttaactcatttggttcaatgtagataaaagcttactttttaagaaagaggtctttaacttgtagaattttagagccgggaaaatccctacagatcttctcactttacagtttgggatactgagtctaagagaggcccagtgcttctttggatgcgttacttttactgctgtaggaggaaaaataaacgtaaattatcaaaaaataatgaaaggttattatttcgtgaaaacatggcagcaatttttaaaggaaaatagaagaaaaataatgattaaacatcttgtattatcatttgtaattaagataaattaattcaagagactaggttttttcttttatacattttcataggaagtattctaacgaaatcaatctgcagccatggtctttctctttttttgtgtgtggatggaagatacactaaattgcactcaactaataccaaaatttgatgctggttgaaaaacagaaaggacccattaaaaatatatggccaattttccaataacataagaaaagatgattgagatttgttataagaaaactttttttttttttaactgaaagtcagatttttaaagaaaaggtcagagctagttatgaggagctgttagaagttctgcttttgggtgtttgtaattttccgattagcttgataattactacatctcccttttcctttgtgtggcatgtatcatctcagttaaagaatttttttttaagtttaaaacaaacatccatatctcttttatttaagagatgtttctgagaatttttttattagtttaatatttagtaaataaaacatatgaaatttacaaggggaatttaatttcaaaaagcaactttcaatgaatctttttgttaaggtagaaattcttttacagagtctctgtcgcccagactggagtgcagtggcgtgatcttggctcactgcaacctccacctcccaggttcaaacaattctcctgaatcagcctcccaagtagctgggattacaggtgcataccaccacacctggctaatttttgtatttttagtagagactggatttcatcgtgttggccaggctggttgtgaacacctgacctcgagtgatccacccacctcagcctcccaaaagtgctgggattacaggcgtgagccaccttgcctggccaagaattcttttataaaatgaaagagttgtctataatttatgttttagaaatgccctgtgtgtgcttatgtatatcaagagactctggaataaggcaaagattaacacattgaaacagagatattagagtattagaaaaagtttaatatcagctacttctagtagctaatttctagtttgacagtatatggtgaaagtttgaaagcatgtttttcaggcacaattgttgatggaaaaataggtgaacaaaagatgggtacaatgcaagtacaggaaaccacaatcaatagaaatgttatgagagcatactataaaatagataatatgtatttgttgaatgaatggatgaatgcatgcaagttatttatactgaatatagaacattaggggcaaatcagattactgttactgaggtaacacaagaaagttcctcaaactaggaaaatctcctttttactgaggcttgttttctttcttttgtatatgcactagtgattggtcactgttttagaaatacatttccactttatgtgtatatttttaatgttaagaatgagtaaaataaaaccatgtgaattacagggtctgtattagcaatagcacgtattctggaatcttgctgtgagttttaatgtttgttttatactattcactatgtagttgggtaaattagttttattttctaagattcagtttcctgagctctggagtaggcatgcactttatttggcaattgtgagggtaaactgagaaaatacttgtgaagtgcttaccgccgcacctgccgtattgtagacgtgcaatactttctctgagctttccagaagacttggtctcccttttgtgggcagagctttaagttaagggcaatgctatgcctaaagtgcggagaaaaatattaaatttggcaaattttccagtttcctaggtatatggcaaaaatttaaatactgtaattgctatgtaatgtctcaaaatccactcctaatgtgaatggtatagagccacagctaatcacaatgcctgtttcaatatttgtgagttacttaaggaaataaccttccctagagtacaaagacatgatagattcttgtataaatttcctggtacaatccagtatactttactactatccatttttcatgaggtctttcatttgggtataagacaatcccaggcacaaacataatgggagataaaagtgaacatactcgtaactgttgcctagcggggagtgttcaaggtgatggtatttatttatgcaaggaactaagactttaaaatcccaaacattttcatggtctggaatggtgatgtgtttatttttttcctttatgtttccaatagcactgacttttagtcccacaaataaggttggaagaaatatctcaatattatgagtaagattattctctgaagaataattttgactgttttctcttattcattaaaaatgacacatcatttaaaaaatcatttcactggtaatataattaagtccctggataataatccttatcttgtcattttttattagtctttagattttttcaaagtgtgcatatgtatttatatgtgtgtgtatgtatgtatgtatatgtatgtgcatatatatgtgtatttatatgtgtgtgtgtgtatatctatctatctatatctatatggtataccaaatatataggaaaatataaccttctcaccaactaccaaatattggtataccaaatatatattgaacctagtttgtgaaattcttagttcgtctatactgccccatcccctcagccaaataaaaagtgaacataagttcttagatgacagtgatcaggtgttattttcatacttcttttccccttgttctctataaggcaatatacagtgggcttgttgattctttagttcagtgttgattatatatattaatgtatgtacatgtatatgtgtgtgtgtgtatgtgtatgcatatatatatgtgtatttggtataccaaattatatatttggtatatattatatattttggtaaatattatatatttggcataccaaatatatatatatgtatatatatatatatatacatatacacacacacatacacacacacacacacacacacacgctttggaaaatctaatgactaataaaaaaggacaagatataatatatatgtggtatattaaatccttttattttggtatgtgtttaatatgattccgtatgtatcatcatatagtcaaagaagtaggcatttgtggatttatgaaaatatatccttcaaggaaaatatagaacatttgaactaaaggtgaaaaaatgagaaatgcatttatggagtggaagcactgtactgagcactgttttcaatattttaaggagctaggaaaaaacggtgaaatactgatggccttgtccgagtaatttacaagtagaaatgagagggtcatggtcacttgcagtgtttatgaaaaacaaaaataccaaagatagtgggacaagtatacaactaactaaccctctcaccaactactatatatagttagatttgcggagctttctgggagggaaccctgtgtgactgcaatggaaaggtcacggagaggaggtgagtgttaagcagagttttctcaggggttatgtaacaaaaccaaaacaaaatgaaacagataaccaagagtctacttttcacataaattaactgcatttggcattgatatatactgttttgggaatgtttgttttggtgacaaatttggtgttctgttaaaaaaaagttaataaaagaatctaataggaattttaacacagatgccaaaatatttaatactaaatggctttgattgattaatctcttttttattattgaatcgtaacattgaactctgatatctaaattattcttaaatatagtttagctcttagatttcagtgtatgtcctatacacattgtcttaaaatgtttcgtaaagtatcttttaaaactaattctggtatttcaattgtttatgttatataatcttgaatcaaaattgtcaatatatatttgtcatgtgtcaataatttgttttaagatattttggaattgagaagataattctataggcaattaaaaaatctagaaagcaaaatattctgcaaatatactgtatttaaaaatattcttaagttagctgagttgagttttgcatccagtttacatgactatcattattattttaaaaatcaagcgtggctgttgaactcagcagaagaaaaaatggtttttgtttgatgaggtatgttttattgtcagactaaaatatctgacctgatgcaaatttatacttttttgctgctaaaagcaatgggctgatctagtgacacacccaacaataaaataacacccagctttaaatattttgttctctgtaaatgatgcctcttccagaatataggtgtttcctcataggtaattgcagaaaaaagtgtaaaatgaaaactgtgggccgggcgcagtggctcatgcctgtaatcccagcactgtgggaggctgaggcaggcggatcacgaggtcagtagttcaagaccagcctggccatggtgaaaccccgtctctactaaaaaatacaaaaaattagccgggcctggtggtgcgcacctgtaatcccagctactcgggaagctgaggcagaagatcgtttgaacccgggaggcagaggttgcagtgagccgagatcgcgccattgcgctgcggcctgagcaacgagagcagaactccgtctcaattttttttttttgacggagtctcggtctgtcacccaggctggagtgcagtggcgtgatctcagctcactgcaagccgcctcccgggttcacaccattctcctgcctcagcctccctagtagctgggactacaggtgcccgccaccacgcccagctaattttttgtatttttagtagagacggggtttcaccgtgttagccaggatggtctcgatctcctgacctcgtgatccgcccgcctcggcctcccagagtgctgggattacaggtgtgagccaccgcgcccggcctataatagctcttttaaagtagctttcaatcttttaaggttacaaatcatatacccaaagatagatttgaacctagtttgtgaaattctcagttcctctgtacttccccatctcctcaggcaaataaaaagtgaatgaaagttcttagatgacagtgatcaggttttcttattttcatacttctcttccccttgttctcttataaggtgatatacagtgggttttgttgattctttagttcagtgttgattatgttgtgcacatgtagggagattatgaacactgacatttaaaaagaaatctttctcagtttgcccctttatgatggcatttaaaagccattctgtctgcagtgaagcggcttattcattcaacaactattcactgagcacctactatgtatcaggcactctgccaggtcctaaaattgcaatatagagaagacagacattttacagattttatagtagtgagagacagtttaagaagaattacccaatttttgttgttcttttttcttaagtgttcccattaagtgcttaataagttataaaaagagtaatggtagtgattatacaaacatcatctgaaagaaatgacatgaaaacttgtgacaacttctgagaaaatagtgagatcatgagaatggattattgtgatgaacaagtataattttctctgtatgacaaaaaatatttttgtagtgtgtacatggtagttatacataacaagcatacaagcatgcttgttatgacatcttgtagcatgtagctttttttgcaggaggttggaaatgtgtcaggatgtatttctggactctgcgctgctcctaactggagcaattgcattgggttctgagtggccctagcaccctcccattcaaaagtgagtaagcaagaactgtaatgaaacttggaggaatagtgagtatgtgttaggcttcctgaagatgattgcacttaatggaacaaattaaagaataatagaatgtggcattggggtacacccaataatttctccaattcctcagatgtcagcagacttgttgcaggttttgcagtgaacatgtcagtctggtggtgtcccatcatcaaggggcggtgactaggtgtgcatggcgttggaacttgctagaaggagccctggaaatagtcaaaaagttggaaatcaggagtactatctaaaatcttgtttttgccattttttaactgtataactttcagcaagtgttttgaagtcccagaggctccatttcttcttgtgtaaaatggagataataccaatcttacaagttaaggctttacatagtgacctgatgcttaagtgatacccacttaaggtgggtaggattttctagctgtggtgcttttccacatgtgaccattgccatttagctaacatttagtgagcatttactatgcgccaggtattgtttgcaaagtcacctgtttgactcctttattccctggtaaccatatgaggtagatactttactgccctttcacaaatgagaactctgagggcaagctagttaagtgacagagtcagaattttgatccatgcagttatcgctggacttctttcttaactgtaattctagataatgaacttcctctggccccagtagggtaaaagagacaaaagaaaatattatatagtctgaaataacctctacatattaaaaaaaactcatttcacttattgacacactaaaaagaattgaaataggactgggcgcgatggctcacgcctgtaatcccagcactttgggaggccgaggtgggggattacctgaggtcaggagttcgggaccagcctggccgacatggtgaaaccctgtctctactaaaaatacaaaaattagccaggtgtggtggtgtgcacctataatcccagctactcaggaggctgaggcaggagaatcgcttgaacctgggaggtggaggttgcagtgagctgagattgcacccttgtgctccagcctgggtgtcagtgcaagactctgtctcaagaaaagaaaattggaaagaatcatttgttttatctttaatttatgagttactgctttcagttttattaattttgatatacaaaatcttagtgatttccaagcaaatcttttaaactaagcagtctttctcattttttgttttctcttgctctatgctgcttatgtaggagaccttgaaattggatgtgtttattgtgcagtccacaaaggctacatagggcaaataaaatgtccttaaagagaggattaagcaagtcaagagccatacttaggaatccaactgttcaagaataggtatcatggtcttcattgttgacttatgataaagatcttccctatcccactcaccctatgctagattaatggttttccttagaagtcttagaataaatttttcttctgtttttcttattgatttgaaaagttgggatatttttcaaataaaatatctatgtacacttgagtaaatggactctgggctctttctgttatgaaagttttctgaaggaaatagatgaacaaagaacgtatattttagtttccataagttttttggttgcatctttctaaacagagtccatttttaattcaaaaacttttgaattttgagtgctcactttgtggattatttagataagagtttatgaggtttgtaaatcatcataagtttgcaggacaaaaattccgccaccccttattcctatacattacattcatttttttggtttcaaagattgattttcttcttagataaggctatgaatcttagtgagaaagaagatgtatggaaagatccagaaatgacttccctttctcttctgaaagacagcaatcctccttattattactgttttataattatgttagtattaattggtagcaatattagtaatagtaaaaacaacaaaatgtcccattccccccattaattatttattataatgattacagttacccagggaactaggtattctcatcaaataatagataaagaaattgaggttaaatatcttgaataactctccaatccgaaagctagtaagaggcagagtcagaattcaacccatgactgccccttcccagctcatattcccagcttcactcccactacttctccagtaaaactattttttaaaaaagggtcttctctgcatctccaagggttataagctacattttataataatgtgtgtatgaagcagagttagagaactctcatgagatctcagtgtagtcctacctacctacctagacaaagaaataattgtatggtttgtcttttcctgtctactgtaaatgtttcttctttctacttgcttagatgtgcatctgtttgtcctacagacactgttcctctgtccctcagtgagctacaagcaacagagctttcttgagtgttcctggatgccaacgcacaacatttaaacatactgactttatatatttgctccctaacgtgaatatggatatttttctcttctgatttcatttcctttaaaaagagcagtgatggctcaggccaaatcaacttgagttcatgcagccctgagcatgatcaggactgctcttgccctgaaagaggagtccattgtcctcaaggacattatgtcagagcccttaactgtgaactttcagtcaagatgctagacttgccagttagttacacagaaactattaggtccaggatggaatgtggcagttaaaacagaggaactttgatccccaagataaagtggatacagacactagtatgcttgcattttaccacagttttgatttgcatagtttttctcaatctaaattccttcaacctgtgtccagtgagtggtgcaatgatacaaatacacaagcgttttgctagaaaacctttaagaatggctgatgcgagtcattccccaagagcccctagtccggagtcacagtgatacccagttatgtcagttcgttttcttttaaaatgtgtgctaaatgttaatctctttaaaaatgtgcactaaaatgtttgctaaatgttaatctctggatttgatatttatgtggttatttatttaatcctttaaccttgccaaacttagccagagtagttctaagatgatagtaacagtaacaacagccgcaacatctaatatttattaagcacttactatgtgcctgggactgtgttaagggcatcacatagcatgttttatttaattctcacaactaacttatgtggaagctattataatcatggaaagtaaagttctcagacaaagagagagccagtcatgaccgaagttcatacaacagtggttaaaaggaggaacaagtatttgaacccaggtgttcaggtctgaagccctgcatgaggagctcacctggctgtgcggcctaattcagaaactcattagtctggtagctttgggaaagtcgccctccttcaggaacctgtttcctgatctgtaaaaaggacaactactcttgccttcctgatcagattgttaagaagaccaaataagaaaggcacattaaaaaagtacactttgaagaaatacgcaaatagatgagactgttttaatgaccttagcacactctaaagactatgtttatcaactgccatttctgtgagtaatcacattagaaagtcacatcacttgtaatttggacttttgcaaagtggtccaccatgtgtaatataacattattttaattttcacatctctactgttactgattgtacaaataattttgtatattagaagaaaagtcattaaacacaatacgattttttatctgagaacatcatgctttaataatatttatgggatatttattgccctcttgatattgcttgttaccactttagtaggggaggagaagactgacttttacaaaaagaaatgaatgcagcatttctgtctgtagcaaataaaatgaggtaaatagttgaatggttactgaaaaaatgttatcagtgtaagggaatggtttaaatatttaaaaattgccctccaaataatgtaacttaaatccaatttatatagtagcagaagtttttgtactgaatcaaatttctgcaattcttcttgccccctgagtagacagagctgtggaatagaatatttttagaatgaacacttaccacaaagtttttcctttaaagtttacattggttttttgaaatataataagattttttaaagtacagatatttgacctatgcagcatccattttttgttcctctgggcatttataaatatgggatttagtcattcttatgttcactgaattaatttccctaaaaaaaacacgtgtggggtgtgcacgtgtgtgtgtgtgcatgtgaacgtgtgagaacacaacctaaggattataatcatttagtcaaggtcataagtgacctgacatgccctggagcatgctgtttataattgctgtggttagttttccttctcattgtttttacctataatgtcaaaacacaactatatggagttggtatgttcactaatagcagtttatctctgcatggtttatagacagagtcaaaagccaacaactgtaattacatccatgtttctaacttagcagcaagctagaaaagtgtggttgaagtatgctgtggatatagtgcagccagtaggaattatagggtaaagtcatttctctacattcttttggttttacaataattgttacttaaattttgttttctggattttaccactgtctgttgtgtttatatgaccacataaagagtgcttgagttacgtgtctctccactctatttttctactccttgccttcctttataaatgtactagttctcctttcactttcttcagactcagcagacagtacattacagttaatagttttctgaagcagcctgatattcatgctctatggaacccataagacttctattatttgcattatatgtttaattggataattatgggaaccatgttgaactgttaacaactgtcaagcctttgattaatcttttgaatgttcattggcatggttcaagttagcaaccacaatacagattttaggtttttatttttgctgctctcacaaccatttgagagggtaaaaatgatttttctagaaaaatataatatcccattttggctcaccgtacatattgtggcacaaagagctatgtaacttatgtattgccataattgcctttgcatatgaagtattgtagtttaatgaatctccagaaaattataagaaagtcttattttttaaatgatcacaactatataacatataaaagaatcctagtcttcctccaaggaaaccagttatcagttcggtctgtagtctccctggccaccttctatacctgaggattcttttccctattttactactcgtaaaatagtaaatttcattatttacaaaataggtgcatcctccaaggaaccacagacacctcctatgcacccacactgagctgtcatcctgagtccccccttgcctaacgttgtctcctgtggaagtggaattccctgggagctacttgttacaggagaagactagtcaatgaattgccttattcttttaaggtgtgttataaattgaatactgaccacaggagcactaatctgatagaaaatactgcctctaatctagttttaaaataagtaaagtgtgagtgtagggttagagaagattgaggtatttaaaaaatgattaggataggtcctccttggtaaggcaacatttaagtaaaggcttgaagggggtggtgaatgtagatactcttttaaacacttgaatgtgtgtgtgtgtgcgtattttcatctattccttacatcagccccatgaggcaagatctattagtatctcctttgtacatgtgagggaacgaaagaacagaaaaattatgcccagggtcacacaactagcaagtggtggaatcagcctttggacacaggcattttgttaaactattattttagatcagcccctaagctggcttagtgaggctgatccaggataggactaacctccttagcagactttgtactaaactagatatacaggactcagattaattcctcttcctgggaaataaaatcctggattctacctgtcatttccaaagtgtgtcattttgaagtaccatcttggatcaagttaatacgattggaatgggcacttcagctgctatcagagcaatcccgctggttgtgttgtcattgtgttttggtgctttaatcaaagcacgaaagatgtgagggaaggaaaattgttttagatgagaaatatgcaaaaggaatctaaacatcattcttaccttctgagttcacatcattattacaggaccattgtttacatttgggagctttatggtaagtgtaccttctattgaggtctgagatggcctcttcaaccagttcataataagataaggaaccagagatgaagagtgtgaaaggagtgtgcagaaggagcaaatacagactagcagcagtacatgttgtggcccataaatatccatcctggaaaatatcttaggtgctttgagttgtagatgagcaacatccttcaaattagatttatgttttattgtctgaagtaaattatatcgatctctgttgccttgagggtctttctttgaagtcgtaccttttgacctgccttctctatggagcagtctgatcactgttagccttaatttccctttttgatgaggatttaataaggtctcaatctcaggtggtcaagtcttaggtaaaatgtttgtgtgaaagtagtgggaaggggatacaacttggagaatctagttatcagtgttgaaaacaggattcagtttccaggcatgatgtacttttttcatcatagtgattagtagatgtaatatcctcttattatcgtagaaaaggtaggggatatgatgggaagacggggcttccatttttggttccattaccagtgactgggacttgtgcttcggttttgccgtctgtataatgatggcattgttaacaatcactcctgaggataaattttgataacgtgtgtgaaagggctttgtgaattgtaggcacactctctctgtgtccgtctctctctctgtgtgtgtatgcatatatttttctccctacctcactaaaatgaaaaattcctgaggataagaaacaccttatttttaacacctgttttatagatagtactgataatgtttttgtattgaacctattgtggactttcagcttaggtgtttgagtgaaagtttcctaaagttagttaacacatttttttcccctcagtatgcctgtagtttataagtagcgtgaagttctactgctggaaaatacagtggacaagtgacatggttagctttgtgctctgactggaattattttcccccagttcgtttttcagtttgtcccaagaaagtcactgcttctgaatcatggtggggttaaaagtctaaattccccacaaaacagtcaataacattataccttagtaatgaccctaacagggttctgtcccagcttcccgcccacattcattgttcatgttttactcactaacctccaaacccaaacattctaggctccgctcactcaggggctcgcctcttttctttcctcagccattgaggcagcctgaggggatacatggtcttccttctgtacactgttgcttttgatttccacatgtttcagaccattggatggcccagttttggaggtgcaaaataagactgattgaacatgtgtatcttgttaggaatgttatgacaaataacagcagctgtataaactaatctttctgtagcttcgcacgactcaattaacaatggaccactgtcaacatttggtcctttttacctcatggttcctgtgaacttttctgttggacatcagattacttttacctaccaacagaagaaaatatcaaatactgcaagtcaactgcacttcccatggtgttctccacgtgatctggggagggactgccaattataatgattactgcattgattctaattagaaagacatactggtcatcaggatggttgtgacagtttaggattaatttttctgaacttagcaccaaaactcatggtcgtaagatgctggtctctgaagtttagagtgactacagcatgaggcagggtggcagggacatagcttcccccagagatcatcacaggagacagaaacatctttgtgagcgctttgccatgtagaagtctactgttgtgcatggtaatttcaagtcacgagaaacagaaatctcaagtgaccttttatctctttaggtaatttctatctgtactttttgtgagaaaaaaggagggtacactggatgttcaagtacaatggggaactcagaaaagcagagttatagccttagagtaaggatgagtaaaagttcaagttccagcttaaatgtacttgacatttgaaccccctgtttgaagcccttactttaggtctatctgcagaggacatctgaaattcctttggcttctaatctatggcaagtgaacaggaatggatgacaaagggatataaagatagagctcaaacaagttgttgttaattctttctttcacctacgaggactaatgaaaagcttaaattactaaattcagactagaccattgtcgctacttgccaaacagtacatgcttgtgcgtctgtctaatccatatttgaaagccacaaacagaagcacataatttggcaaaacaccaaaaacatgcctcggcacacttctggagattcttccaaatgacttaatgattcaaaaatgtgtgtgtgtgtgtgtgtgtgtgtctgtgtgtgcgtgcacgtgtgtgcgcgggtgcacatgcatattgcctggagatgcttggaataaattctgccagcaaaccatgtgtattacacttgtttggaggatttgaggatttctttcaaaattctgaattgtagaaagcaaaagataaggctgtttcttgggcagttactttctcttttattttaaagatgagtaagtaaaaacttgttatttaaaaaaaatctcctcaaaatacaacatgtaaaacattctgtcttttaagaaagtttaagcattctatttgtttttgaaatgtgttttgagctttttttaacaggtggatcacaaatagcagttcagtacaagaaaagttcttcgtagcaccatgaagaaatttcctgaattgaaaaattattctttcctaagctttttacagaagtatttttttgtggcctgatttctgcttgatatagaaaagatgtactttttaaaaaagcacataatctgaattcagtttacaatacttgaagatatttaggtgactgcatgaagctatattaataagacagatatggaaggcaaacagtccctaagaaacctttcgtgtgatcagctttccctcgcatgaatattatttttaaagtcagatacttctatgtgtagtattttatttaaatattgcaggaaccttcacaagatagatattattattactcatctaaagatgagaaaattagagctcacagaattttacaataagttacccagtatttcacatgtaggaagtggcaaaggtaatctgaagcctgagtccgcagataatgcctttggcgttgtacctttcagccttctctgagaaaggtacatttgtattacaatttatcttcctttcattccttaaattgcaaaccatattgctctgaaggtcattctatgtagattatgttaatgtcttccagttagctgtttaagttatacctcatacttgtaaattgtaaagcacctttatcttttgtttaaagtatcttatttaatatttatttcaattggataagatattgtttccattttacaattgagaaaataggattgggaagcaactaccccaacagatagtctagatctggggattaagaacagtatcttttccccaactgtttttccactgcattttaaatgttttaagtccaaagaaaatttgtgcttgattcaccacctcataccaaaaaatggagtatggcaaacctagaccttttttgcttgacaagacaaaacaaaaaacccctgcagtatctagtcatgtaattcttagtgaacatcttctcatatttcagtataaattggtaatttgtcaagctatccatatatgcttgagagactcttcatttttggttaagggtaagaaagttttttttttttccttcctagtttcagagtttttggtatactggtagagttttgaacatcaacaacttttagtcttttggcataataggattagatagattatggttactgaattcacacaaatgtaaaagaaaaatagagatagggaagtgagggaggagggacttagttcttactgccgtatttatctatttttagtgccatttgaaaattgccacaggaatgtagcatctcttttctcctgcagacttagttttacatcagtttcttagtatgccatataggatagcattatactcatgtccttttagataagtactcacaactaggaaattaagatgccaaggatataagcccctgggtgtgatagggttttcacttatatacacagatatcattcttcaaggatactgcttgtgaatgggatgactcaggagatgttaatgagagtcttcctagcctggcatgatatcctaaccatggcgccgtgcactttttcttccctgtttgcctcaactgcactgatatcgctttattcttcttcttactatgactttatgattgatggttacgaaaatcccagaactgatatgaattcaagtgtgttcaacgattagagtaagagaatgttggctgataaagaagaagttgactttagttgaacacaaagatattgaactctaagttactcatttaaatatgtgacacagaagtagaattcacagaggttaaccccttggagcactcagagaccatgatcctggccttgtccacgtaaaacaactcccttcagaagtaacaagagcaaggtccagccattgccaactgaagcccgttgaatacactgggacgtgggcaaattaagaacttactgatagttcgcccactggattttatcatagatcttatcagcttcatggtctatgactgttgatttgactttctcatgaagtaaattaacttcaaaacaaaacctcactatctcttatctgttgcctaaacaatgtttccaaaaattgaccaccttactatacagttcacttggatttcttaagaaatcagttaatttagctaactggcaaacagaactccaccacctcttctctggttctgaaacaatgtttccaaacgatggttgtcctttagcatgctgtcagagcacagtaggccccaatttttaaaagagataattcttttgtctttaattttgtcaattttagcccagttcgacttagttcttgtgcctcatgttggatagttgctctagagaaatgtgatcccaggaatgctggtgatttgctgttttaaaatggtgctgtgctttaggtttctgttcaaatctaagatttcagaagagtcagtaactgcaaataatctaaaaggggaagagtgaagaatgcttctaacttccctttgaaatgaatagctctgccagagcagcagctattagaaaaacaaaaacgacaaagaaaagctgctcagcccagcacacagaggtaaatttacttacatcagactgaaaaatgagggctgggctttgaaaagacatcccttctgactagaggaaagcttgtaattttggcacggctgccgccctcctaagcccctgagaaattctgaaaaacattacggaagactgttcttaatattaatggatgtcttcgtgtgtgtgtgtgtgtgtgtgtgtgtgtgtgtgtgtgtgtagggaggaagaatgctagagagagaaagggggtagagcatgagagagaagaaaagatcacttaggaggaagaactaccagtggaaatgtctactttctgaaaaataatttgcatctgtcatttttcactcttcagtaaagtagtggtcaagatgagatatagagaagcattcaccatttacacttcaagttaggcttgcagtatcgtggctcttttaacaagacttccaaaaatacttgtagataacattgctcactgatgtgatctcaaatctattatatgacatcagaggtgaaaaaaagactgtttccctgtggctaattgtggtgagtgtcacattatgttgtactgtagtgaacaatttcgggggcaccaaaagcctacagctctgcctcttgggaggagacttttcctttgcagctcagcttcaggaaacgtgaacatttgtgttttcaagaccacataccattgggaaggaagtaggggtggagatgcgtgctgagattaagtgggtatgagaatctctgtactgtgtatgatctggaaactgctgaattttatgtagccctctttctggcatgcctttagaattttaaagtcacactgacaataatactgatccttgctaaggatatttttcacaaaataatttatttactttttaggcgaggacagacggacctctgtgtagcgtgcctgaccagcttgtctctgagctgtgtgtcaatgtgtctggggaaacagagacagaaatctgccggcaggtactccacagtcagatttatttgggatgtataactgtaacctatcatggtaaagaaatttaatatgtaattatgggaactagttgttaatagacaacttgaaagttattttgagaagggaggcattaactccccacagccccgagtcttccactccacctcagacactggcccatgttaccttaaaggatacaaggcctattgtagtttgacatgtagagttacacagataatacacagagaagctgagtttctttttgggattgatgagggggaaagagacggaaaatgtacttattaaaaagagtgccttgatttgctgtggagtttaaaactgggaacatgttttcccagacgagcaaaagctttgtagcattgctggctcgttaatgagtgatcttctttctccctggcgtgccctggctgggcatgttttcttgacttaggactgacactctcaatataatcttaattcatttttagtctaggctgactaaatcttctgatttggcaaagcagactgtcgggattgccattgttatgtttactctggatttatatcttaagttgaggctaagtaacacatttacataaatcaactcagcattagactctaacacaaaattgtttaccgagagaaaagactaattgtattgcttcctgagatttgctttcataatatattaaacctcaaaggatttaaaaatgtagcatgttctgttttaaaattaactcttctgggggttttgcttttataaaaagatagaatttttttttttttttttttttttttttgcgagaattgattatagctgttgctactgtggatgactttcctggaggtagaagataaagtggagcaggccgatgttatttagcaagagtcatatgctttcatagaaggatttatgttttatgaaactggcagcacaaatgctagaaaagaatttaaaaagttcttttaatactaaagatattgcaggaagatgaagaggctttaaatttatagctgcaaacattttcagtaggagtgtttttaaatgatagcattttatgattcatgcaaatatcatgttataatttatttcctttaaaataatggcaaggaaaaatgtcatggctctattgcatgggtcatcatcctattaagtcatgttctatttaaaataattttacctttattaaaatttacttgcattttaaaattacgacaaaaagccagattgaaaaattgggagtaagatattttaacatgtatgctatagttgcaagttccagaaatatgtgggggaaaaaagaggttagtagctattttaagtttgttcaaaacgtataatggaaacttgcgccttttaatagtatgaaatattagcaaaatgttactgatcacgagatatactgttacatgtctgactattaaatgtaattttttaatggccactggatggaatttgccttttaaaaatactagtcttatgcactcatggttaggaaatgcaataacttcatgacaagtttttatttttacttctaaggtatttctttgctaaagttattagcacccttaaaatattcttttgtacctagggacaaaaattctctacccagagttcttatgagtgtttttaagatggaccagatgacacagggtcacgttcattgtgggcagtatgttttgttttgctctgtgaaatggctttgtatagagttttagtttttctaaataaattattattcaaccttacagtgttttccatgaggttccctaatccctgactttatctcattttgctccatgtaacagcagtgtggttatctggccaaccacctcatccctcttcgtcagtttcacttggaaagataggatccatatttccagtctctgaaaggtggaagcatgtgtttcgtccagctgagtctcttggtctgatttttttcccggtcctaatacatgtttattcctacatgtgacaaatctgcagtcgtgttttctttctgagttataatgactcagatgtcataattaatttgatgagcaggtgggggttattagccttgtgcttcacttgctaatagctgcacagtttttctaaagtactctttcaactaaggaggcatttcttcacatagaataaacagtacagcacaaaagcctcagttagataactatccgtgggcttgaaaagctgccaagcagatgttgttattggagctggcccaggcgagattgggccaggcagatgctcatggggaggggtgtggggagggaggaggagaagggggaggagaagtaagagagtagaggttagggggagagggggaggttctatgggacgctggtgctttctttgcagggggttgggccagattttgttggggtgggaggtctcttctaatgagccacctccatggttatggcctctggttggtctcttaaaacatgcatacgtgagaatggggatgggggtggaggagaccctctctaaatatccacatgggagcgaatctgagtgttcatccagcagcctgagacttctggtttgcattagggcggctgtgtgcaatttttgaagggcctacggagactcagcttcatacctatccacatatgtaatggacatgactgccctgacatttaccagaactcataggttctgctttattgctataaattaggttgtgcaaatttaagacaaaatgctgttttgtttcctgtcacctcaatatgtaatttttcactgagcattccctacttattaaaatgttgcaaagagacaccttactttttaaaattaaaatcagtcttggaacatgtcagatttgtaggaggtaaatgtgtggaaggtttaatctaagctgatgttgtttctgtcctctgccttttttttttttttttttttttttttttgtgatctaaggctttttagaactcatctctcactccccttcactagattaaattctgtaatctcatttttctttgagctgatctcaagccaatggtctggggattttatagccaagggataatttttgataatgggctattaaaacacttgcagctcctaccctgtctttcaaattagcatgtgcacagattgcctttctggggaaaaagtctttcccttggcaataagcaactgactatgtgccacaagcagtataaaagcttccaggaatgtttatactaaaaacacaggtaaataagaaatgataaataataatagtaactgtacagtgtgaacaggaactctgcctaggattattattattattttttaccctttggagacaaagttttgttttcccttattcagacagatttagtgtgttctgacaacagggtcatctaacagtttccttaatgatggaagtacagtggcttgagacagctgtgtaaggtcatgtaactttcattgttgtttatagtgtgcttgttaataggttaaaatgaataacttgctggatggaggtcaggtagcacctgtataaataatgaatttgcccttccaaaatatataatgtaaaattaatcaatatatatagcttgccattttgtttttattcagttcaacttccttgccgctctgtagttttcagaggagtaaagtaaaaattatgagttctgagaaagcaaatttgcttgccataactccatttgagggtgactgcgattttgttagcataagattgaagctaatctcctaaagagtatatctgattctgtgtcttaatcatttttcacaagaaaaaaaaatcgggacatataggtatatgtagagtaacataaagccaccaattgtagaactgatgtgatgtgaattgtactgagggttggcatgaatgcttttctttttcacgtgtaacattaggttcagacatatatgtgtgcagtgcattgctgtaatgtgtgcagatggtaagaacacatatgtctcaataccatgctttatcgctcaatagcctgacagatgtatatgggtgaattcattcattgccctctctgttgattagtagcactttgaaaatgatgtcgtaatttggcaaactaaatcctggtcggggagcagtactgaaagtattgaagaaatgacacgattatagtttgatccttgtacttagaaccttcatcaaatataaggttttaggtcttctgtaatgttaaaaaaaggaaaggaaaaagagctagttttacatatgatgcagaatttgaaaaatttgtctttttattggcaaatgctgatttaaaagtccctgaatcatttcagaatctgtagagaatgagatgtggtattatatgtgatatcacattaaaaagtaaaagttcagtctgtggacaaagtctattaaaatgtttttaatatagtagaggacctcgtaacatgagccactgttagtaaaaaaaaaaagtttaaaatgtatatttactcatatgtactagaacataaataagtttcctgaaacaaggactacatgaaacaattgctaataaggcacagttagtggtaagtggagattgatactatctgtaatttaataaatggttgtactgtacctaggtcttcaactgtttacaattgaaacccaaagccgtcaccatcaatatctctttagtacttctaattttgggtatgtctaattcagtgaacatttgttttgtgcttactacatgtctaggagcatgctaaaggttagagaaatatgaagaccaatgaagtaatccctgttctcaaggagtttctaatctaatctagcagtggaaacagaaacataaaactaagcacctaattcatatgaaacagatagtagacaatgccacacagatacataaaaagagctattggagtacagaggaggcaattcagaattcacaagaatccaaagaaggttctcatgactcaagaaatgagcttgaaagatgagcaccgttttgttagacgaggatgtgaggcatgggggtcctggaggcaggaaacagcacaagaaaaggtaagtcattggggatggggaaagcatgttggtagttgggggtcatgaaccatcaggggagggtgactagactttagcctgtgtaggcgaagtggaggagagttgtaagagactaggctgaaagagtagggttgctgagggcttcaaatgccacattagagagtttccagagggtagatcatcaagctttcaagctgttatatttaggtggtcctttagaagacaattctgacagcaaagtggaggatggaatgaaggaagaaaatggagtgaagggaggaggtcgttttaagccaggcttttaaattttcatgtaaaatattatctttgtcttctccatattttttgggtacagtatataattttttttttttttttgagatggaatcttgctatgtcggccaggcgtgatcttggctcactgcaacctccacctcccaggttcaagtgagtctcatgtctcagcctcctgagtatcagctgggattacaggcacccgccatcatgccgggcacatttttgtatttttgtagagatggggtttcaccatgttggccaggctggtcttgaactcctgacctcaggtgatcttcccaccttggcctcccaaagtgctgggattacaggcgtgagccactgcgcccagccctgaatatttagaacctaaaacaggctacgtatttattcatttgaaaggttgtaaagttttaaatgagcacctgtcataccaccgatgttcctaatggctttggatacagtagcgtacaagacagacatggtctctgccctcagggggctcactgtctattcacagggaacaacaaatcaattcaacaaatttataagcaagtcatttccgattgtgttaaatgctatgagaaaactaatagggtcatagataatacatagattaaagtgaaaatggggtatgggggtctttgttggctaaggtcttttgggaaagtctttctgaggaaatgaaataggaaaagatgagaattaacccagtttcctagtactttcagtactcatttgtgacgtcagttatgaatatagctttggttaaaaggccctttgagccatttgcatttattgagataacctcagggacaggttaacctttcataattatcagaaagctatctataagaagcattttgctgtattcctctatagactacttttgtggaatcatgatttaaccttaggttggcttcaccgtgaattaaatatttaaaaatattttatatgtaaaagatccatatgcagatctttgcttttgtataaaactacctttttcctattatgtgttcagtgtcccttattcaactcccctgcaatatatttctctgaaaaatcccttccaggaaacaaattttctttttctgataagttggcatgcctcttttcatcttatgatgagaactgtgtatgcaatctagttttcttcttttccctgtatgctagaaagctcacagcccaaaatttgttttcatttgtctgttttccccagttctgattctgtgaattttctactgcctgtctgctttcatctcttggattttgcattttgttttatattagtggattattgaaacttttgattaattaaagtattaagtcattatttgtaataataaatcaataaaaatcattcttcagatttggtgcttaggatctgaccgagaacagaaacaacaggaatggatagattctggagatattgaggaaaaagaacttggtgatgatagatgtagagggtaagggagagggaggaggggaagatgactgcatcactgaatcaatgctgagatgggccacaaaaatggggcatataagaggaagaggagatccgagggaagcatgaagacttgggttttactttattttattgttttttttttgagacaaggtcttgctctattgtctaggctggagtacagagacaagaccgtggctccttgcagcctccacctccctggctcgtgaaatcctcctgcctcagcctcctgagtagctggaatcacaggcatgggacacaataccctgctatttaaaaattttttttttctagaaatgggggtctcactatgttgcacaggctggtcttgagctcctggactcaagcgaccctcttgccttagcctctgaaagtgctgggattacaggtgcgagtcaccacaattggctaagacttggattttaaataagccatagatcacatgccctgctgcaatagctagtagtcaattaaaaagagtgtttgagcataagggaatggttataattaggaatgcagatttgggtgttattgaagacttagaagccagtggagctgtcaaggaagggattgcttcttgagggaatctgagggctacagatggacccttgagagaggtctacagtgagtgagtacgggagaggaacccacatctttcagccctcaggacctttttactgtcatcacaccaaacatcctctccctttgcctgaccatcccatccttcagctaattagttctgattcattcttcagggcccatctgagacatttggtattgcagtaagttgatctccccttgttgaagctggctgttccccctatggactcttgtagtactttctacttccctaacataagactgattacagaatgctagaattgcttattgctaaatgaactctttctctccactacactgcaaactcattgaaaaatgtgtctctagcatgtagctcaatgcttgatgcataggtgatgctcaatacatgtttgttaagtgaataactgaattcatcctagaagggagaggaatgctgtctcagagagagggatatggtggtcaacatattggtgttcatggtagtcaacttgggctgccataacaaaatactatagactgtgttgcttaaacaacagaaatttatttcctcactggaggctgggaaggccaagatcaaggcactggcaaggtagattttattctgaagcttcttctcttggcttatagatggcagccttctcattgtgttctcacatggcagagacggagcaagcaagctctccggtgtctcttctgataaggacactagttctgtcatattagggccccacccttatgatgtcacgtaatcttaattacctccgtaaaggctttatctccaaatatgaaggccctgttctgcctacattggggttgggcttcaacatgtgaattttggggggacataaacattcagtctgtaacacctccgttgtagctgaatactgttcatcatttatagagagatagatagtcctagttgcaaataggatataatatccaatctatagtggtagatacaaccttttctccaaatcctgatccaaagaacattgctgagacctagatatacctttcccagatcaataaattcgggtccagtaggtctttgggtttgttctcatgactgatcttgcagagcgtctcatgttgtcccctgaatctctttctactcacttaacactgttgataataactgaatgtgcttaggctgcagcttgaaaagaaatttcatgagtagacgggtgtcaggcacaggaacatgttaagagggaagtcacggaacctaacttatcctaaagttagattagattattatctgcttgggttgctatcagtgtggctttgccttaggttgggggatagcccagatttcctttcaagttccttattggctttaacgttctctgattggaacttaaaaatgatattttccagactgtttgaaatccttttctcctctacattctagaaatagagtctgttgaaaataagaacagatccaggaaagaagtatgtacttaatattgtaggggacatatagcagatcggaccctttgaatggttaatgcaaagttttgtcttactgtaatctgggtaatcctcagatagataaaaattcatcattgagtgtttttactttcctaaagaaaccacagtaatatgtctttttctcacctaaatgctcttaaatgcacagagagtaggggttcctttggtttctatttttataatagtatcttcctttagtcagtttctttattcctagaacattatttattgggcacgtacttttgaattaaaaaacaaatgacctaaatatagaaataaccttccatggggaaaagaatggttgttgactgggcaggtgaagtaaggccaggagtggatattgaaccacctctcttagtaacagagaggaaggaaaaataaaattggacttttgaaatacgtatctagtcttagtagggatatctatttgctttttttttttggtcaattttaaatagtcgtttctatatttctgtaatattcactaggaaatttgtttccctgaggccagaagtctgggctagaggcaaaacctttgaagtttgtctcctttcttcctttgtacattaaaataaatcaaaacaaaactctaatccttttattatatttgacaaccatgggcaattgttctgccctgtcagtgaaatcactctttctcacttaaactgggaactttttcagggttgcttttttgcctccagcaagttttaggagagacatggacataacacaggagcagtaatagtttgtacgaggaggataagtaactgccagatgcagaggacaaaccctgatatttgggtttcacggattacgccatatactttcacttttattgaatgggccactttatttgtctgcagctcagttttcgttttgctatccctaaactccaattctgaatttgataatgtaggctcataactgttcttcgtcacagatgcacacacaaattatttgggtgattttgagtagtaaaggtgaagaatctagatggcaaacctgtgtatagccactcagatccttctgaggtcgcagtgcagaattccatatgtatacagggtttgagccaggcttttgggaaagctgcacttgaactctctccacttcgcatctttttaaaataagtttatgttttaatattttgaacacagtctttttccacaggtaaatacgggtatggaaacagacttttaaaaacaagagtacgtacttggttttgttaatgaaggggaatgttgaaagtggaacttctggaagagtttttcttcatagggaagaactgaaggaaactatttcttcatgaacatccttgagttcgtagcttttatgaaaaaaaaaaaatcccctcatgctattcaaatgccattgaaacatccacctttaaataatgcagtaagggaaaaaaaaaaccttgtttaacagtagtttgttttagagactgtacaaataacaaaatcatgttataggttaagacaaaaagccataacaacccaccctatcagcccttttcttttagggggaagtgagccagatgtttaaacaatatggcaggatatgtgcatgccgcagtacttggagaccttgggaaagaaatcatgtctgcacccctagtgtttcacagttttagactcctgacctagaaacagtttaaacagatgtttagttcaagggatttatgtcgacattgaatttttttttcctttggaaatggctgcctctaaaatgggagccttttactagaaaaaggaccagagaaacagctacatctcaaaacttgccagtttcatgttgaaactggtctggtgcagcaggaacaacaacaaaaaacaaacaaacaaataaacaaaaaacaaacagctgccttaccagtgactcttgacgcgtatgaacatcttttctttctccgctgtcggttctgtctctagtaagttaggattgtcaacagtaacagaatttacgaaaggagaaggcatctcagaaaaccctagccgttataagccagcataaattgtggctccttttccttgtctcaattctaacccttttttctagccttcagcccaccacaatcccattgcgctccttcttccagaaatgattcttctcactttaatcctggtgtggggagttcattccataatttggatcagtcaaaaatgatacattacatcatagctgcctttatgaacatgtttatttcatatctgaaatgttttcgtgtgtattcgctgtgctttgacttgcagaaggagaaagaaagtagttttactggaggcaaaacagccacctgtgaaaactaattgcgtaggtagaggtttgatggtatctctgggagggatccagcaggaagaaagtaaatgttcttaatctacaaggaaatcacctgtatgccaaactgaccctcacaatcaaagccaggtttgaaatatcccatcaaataggtggcctgtgtttaggagcctggagtgagaagggcagcaagagggaggagtcatggtgagggccggtgcagtgcatcttagtgccctgtgtagataagtgaaaagtgacatgatagtgtcagggctcagaaaccgatacaccaaaatgtggcactttgacatgctgagctgaagaagcagccttaggtctctctgacactgtaccccctccacctcctgccttgcaatcctctgtctctcccaaagcaaaggaggaaattgttccctgaagttcccttatctgcctcaagttcggatgcaccaaagaataaaacaattatctctggttccttccccgaatttccattaactgagctcatagcatgtaaagaaacactgaagcctgtcaacacatctggacagacatttgtcacaaaccattgtctgctgtgtgggcccaacagactttgtcccaggccactttaagttcattaagttcccctaaaaatcatttactgtccccttaaaaccatccagacttccccatctcccattcctctaagaaggagtgtatataagcatctgtaccccattgggatatggggcagtcatccctgcattctcccccttgcacactaataaatttatatgccatttctcctcttaatctgccttttgtgagttaattttcaacaaacttttagagagcaaaggggatgttttcccttggcccctacaatggactcaactacactgccttattacgggctgaaatgtgatatgaatggtatatattatcttcaaacaaaaggtttgagatgtgactgcttttgagtttcttctttcttccttttcatcaagtttgccttttcagtctttttttttgagacggagtcctgctctattgcccaggctggagtgcaatggtatgatctcggctcactgcaccctccctctcccagattcaagtgattctcctgcctcagccacctgagtagctgggattacaggtgcctgccaccacacccagctaatttttggatttttagtagagacggggtttcactgtggtggccaggctggtctcaaattcctgacatcaggtgatctgcctgcctcggcctcccaaagagctgggattataggcgtgagccactgtgcccggccccttttcagtcttaaatgctgttgtcttgacttttttccctcctcctttcctggattccaccaatttagtatacctacaggtttcttgctattaaaaagctaagacatattgtgatggagaggcaagaaccaatgatgtggctaccttttgccaccatctgtgtagctccctgaactgagtgccttcaaattcagaaaaagcaggtcctttgggccaatccatgccccatataggccaataagcatgctgccttgcctgaacccagtatagaagacagatctgtgattggttgtcaagatggtaggatctgagctatcctgcaagattctacattttgtttgtcactctaggtagacagtggccagttcagatatgctcgactggcacacctccatgttaccttagctgtgcatatatctgcatgcaggtaactttcctaaatggctgtcttccatgggaaatcaaaaccgtagaggagggaaaagttcctattatttgaagcaccatgagatttagggaaaagttagacaatccttcctggagtccgacaaaagtaaatctttagaaagtgacaaacgagtttcacataagctacataaactaagtaagaacatgaattaaaaggatatttacatgactgaaaagcaattttgtctggaagactttggtcacatttcatagtgtccttggtgagtcatagtgagtgcttggattgggcctctgcatttatacatattcagcctctgcattacagatattgagccatcctggggtggaccaggagaccagaggctgtctcagaactccagtgagcttcagttttcactgacaggaaagaaactagatccattctctgaagtcagtgcgcctcacttttctcagtgcacttggactcttctctacgtgttctcaccccagtgtcttgtaggttctttcaggacccagcagttctacttggcacctgttaataaaagtgcttcctccagaccctcacagaaggcaaacttgtaccaccacgaatccatcttcaggttgtattggaggcctacttctcagcattaagccccagtcaactaaaatatctgtttttcaccaatagttttgttttgtttcgtttcgttttgtttttgaaatggagtctcactctgttgcccaggctggagtgcagtggtgctatctcagctgactgcaacctctgcctcccaggttcaagcgattctcgtgcctcagcctcctgagtggctgggattacaagtgcccgccaccacgcccggctaatttttttttgtatttttagtagagacaggatttcaccatgtttcccacgctggtcttaaactcctgacctcaagtgatccgcctgcctttgcctcccaaagtactgggattacaggcgtgagccactgcgcccggccaccaataccttttaaacagaagatcctgccaacatcaatgtatggcagtacccctggagctgtctttccagagtctaagccccatgggcccatgcttatgtgagaaacttctccctcttcatacccaagactcagccataggatcttttgctcaagtagaatccacagtcaagtccagtttatttctatgatgcttaggaacttagaccattttgatatgtagcaggtctttgacatttatgaaagatttgtccagagataatgatgagtttctaaatttacaggtagctctttggagtataatttctttcctagacatctgtattcttccaagaaccatcacttccttaggccttttcactttctcttcactttcatcaccaccacaagcaattgacttcttttttcagtgctcttttatttttaaaacaaagaaatgttatcacttcatgagctttgtatgtaacaatgaatgagatgtgaatgttgaatagttggcagggttcactcaataccaaagagattctcacgagccttatgtgcttatgattcagatttgtcctaaggcaaaaccacaaatttgattataccactcccccactccccatagaactattattaatatttcatggaccttagaacgtggtttgaggagcactggtatgggatatgagcctccaaatgaagccagatcctagaaagaaggcatagtaaccagagccctggactgtgtgtttgttagtcctggggctcagtttcaagttgagcaagtgtgttgtgtgcacgtatacatgtgtgtttatgtattttgtttttataatgtttctatgcaacatgctttaaaaaggaatgacatccttactaacttgatttatgaagagaggatgtaaaacttttaaaagcacgtattttggaaatggggtataatggaaaagtaaacagttgaaataatgggattatttctcagagtagttgcatagttcatgctgaaccttcagcaaaatcttatttggaatggcttctactgtaaaacacctaggagcaaacttaaaaatactataagttggcagcagcagaaagaattcacagggaatgtagtagtgcaacatcatctgtctttgttcaaaaaagtttataagatagttctattccactgtcttgccccatggcagaagaagttctggctgggagagcaggcctggaaaggcagcacagggccacatactccagatgtgtagaaatgttctcagatacttagacaacatgctgttctcacccaccagcaaaagttctttgactggaagggctgaattattcagcataatcctgaaagcattgttcccttactaataagtatccaaggttaaacagcctattggttaaattgcatgttggaataaattgctctgttagatcagagcagttataaaactgtggtagatctgaatgaatgttctcagtgatgataagcagtacctttgcttctattaaattcatgttctaatacgagtcatcaaaaggttcttttatgctaactatgttcataaaagaacactcaatgtttgaccaccacaacagctacagccactaaaaacataaatatgggggaagtccacactgctcagacagtttagtaaattgtattatttaaacaaaatctatttataggagatactgagatactgatatgatgctttaagaaaaccttgtccgttaaaaaaaaatctcattttttctttagcatgataacaaataattctgcctacttatattaataaattcaatgacaaggaaaccatagctggcacattattggtcttagtcttagaattatgtttctttctttcgttttttttcttttttgagatggagtctcgctctgtcgctcaggctaaagtgctgtgaagcgatcttggcacaccacaacctctgtcccccgggttcaagcgattctcctgcctcagcctcccaagtagctgggattacaggtgcccgcaaccatgcccggctaattttttgtatttttagaagagacagggtttcgccacgttggccaggctggtctcaaactcccgactcaggtgatccacccaccttggcctcccaaagtgctggcattacaggtgtgagccactgcacctgtccagaattatctttctattactgaaagatttttgaggttttctctcttgttcattcagcactgagctaggcattgggaatgctgggttttgctggtcctggggaattcacagtctaatatccagcttgtagaagagtgactttcagtgtttcacagtttttttcagctgtgcagtagctgtaataaggcacagctgtcaccttgtgtgcaccatgttctaggactatactcagttttatatatgtgtatctcatttaatattcagagtaacctcgtacttcccctcattttataggtgaggaacctgagcctctgtgttaaccaacttaaccaaggttaaacagttagtaggtgtcaaagtcagatttagaaccaggacagtctggctttaaagccttgggtgctaaacctttaggcaatactgcctaatccataaaagtgacagtgtttttgttactatgtgggcccttcttgtgctctaggccatagaaaggcatcttggctctcacctctgcttagttctagggtagcagatcataatctcatcagaactggggtagtgacaaagccaggtcaaactaggccatggaagctcagttcctggttctatttcaaaggcaggagtcaggaagttaacggcctcaggatgctgtgctgtctcttcaagttctgcagaggacctctggaactggtgcattgttggagcagatcaccctgctcagctccctctcacccttctcacccaatggtcttgtcactttgggtccagttttatgagctcacagtgattaagtaactgtgattctcatggttctgagactctgactgccaaacaagctagtgttgctgaaatattttaatggtctggcatattcactttcctttttggaagttagtggattggcagctagaatatgaatattatatttcactcctcttcctttttttctctatcttctaattagtctttctctgctttctgatttttcttctatctcatcctacttatatgttttcttctttatggttagcagtgaaattggtctaaagagaaaacttctgtttgtaaggaggggttcttgtctaggtaaaagtttttggaaaattatttatttctaaatgtgcagaatgggtatataattaataattttttttcttagaacatagtttccctgtaaccatgttttggtatggaatgaaagatgaaactgagattattaaggcaaaaatgcagtaagacctccctcaccctgaaattcaatctctctggaatttgattagtgtttttgttggttttacatatgaatattgttagagggagaggcttctagaaaaagtgggtcaaaatgaatatttttggtaaaacagaagctgcataaaatgtctcatttttatactcataatagccctgtggggcaggcaccattggtagcttccctttgcacatgagggagaattaagggacttctcaagatcacacagctaataggtggtggatttaaactaggtgccttgagtacagtgttttgtatttcactaatactatgctagcatggtgttttgcgcttcagtaatactatgctagcatagtgtgtggattctggagcaggacagagttgaattcaatgttttccaaaggcattcaggctatttgatcatttctcttatatgtgattctcacagtcagttgagtgcttcacaaaacacaccaagactcatcagtgagctggattgttaaaaggttatttatagtgaccttgtgagagtctaaacactccaagtatttcatcaataaaagtgaataataacttttattatctttttttaaggatgttaggagggttaatctgtcactacctatagagcaatttatataaactgaagcatgtccatgtccatgttatattagaactaattcttaccagcccatatctggtcatcagtatgccctggatttttatatcatgtttggttaatataaagtttatcatcccctcagtcattgaccatacatccatttcatgagaattgtaaaacaaggtaaagtcagatgctcacagtcattgatatgtgctacagttgagatttaatccccaggtgatcttacattaaggaaatgtcagtaatctgttagagacacaagttcaacaaattcagcaagattcttttacagttgcagaatcaaaaaatgtccaagtgttaactcctcatggttcagccaagtttcttttttctttctttctttctttttttgagtcagggtttcactttgtcatccttgttggagttcagtggtgtgatcatagctcactgcagcctcgaactcctgggctcaagtgattctccaactttagcctcccaagaaactgggactacaggtatgcgccaccacacctggctatttttatttttattttgaagagatggggtcttgctatgttgcccaggctggtggtgaattcccatcctcaagtgatcttcctgacttagcgaaggttattttgttttgaaatttggaagcatggttggcgctttcataagctaatactttaaagcttgtagctttaaggtacttgtctgaagttcactgaagaggagcaaaagatcattattattatttaggcctctagaccttgcttgtaaatgcacatatatgcacatgcatagattcacacacacacagaatcccaactacaaagcatttttcagaagtcttattcaaataaagaggtaaatggctctgctcttggtgagaccctaataagcatgtgataattaaattatttatctcaggaacctatgtatcattattaacactaatattatagcagatgggcttttggatcagtggagggcctttgagcagctattagagaaccagtgcacgggagtactgtaaaataaattagcctcatcatttcacttcaaatcagcaaacgattattgagtgcacatccctgaagatgcgtgtctccatgcttatgtgcttatgtctggtggagggataagatcagtaagtaacgcaagcccatatcaagtcagtgtttaagagaagtactgtataaatgtgaagctactgagatgcagtggaggagctcatatctggttctaggggtggagggagcatcttatggagaaatgctgttttgttttgttttgttttgttttgttttttttgagacagtgtcactctgttgcccaggctggagtgcagtggtgtgatcatggctcgctgcaacctctacctcccaggttcaagcgattcttatgcctcagccacttgagtagctgggactacaggtgtgtgccatcatgcctggctaatttttgtacttttactagaatggggttttgctatgttggccaggctagtctcaaactactggcctcaagttatctgcttgcctcagcctcccaaagtgctgggattacgggcatgagctaccatgactggcctgagaaattatgtttttaactgactttaaaagacgggttttgtcaagtgctggggaggcatttagaccaggggaacagcatgagcaaaagtcaaagggcaggaaaatgtacaagaagttatccagtgtagctggaatacaagacccatgatgtgctggaggccacgtgaaaaaaataaatagagattacttcatggagagccatgaatgttggcttgagagagttttacttactgtaacaattccgcaaagatacctagaggcagcacccaggttattacgtagtctcaaaagagtatttctgacaacttcattttaaacatttttttcttttttttattaaaaaattatttttggaaatggggtctcactgtattgcccagagtggtccctaactcctgagcttaagcaatcctcccgcctcagccacccaagtagttgggactaacaggtgtgagcccctgtgctaggctaaaacattttatttgtgcattatttcttcattgccaaaggatcgaaatctcacttgcttttttccttctgggagttttgtgggctgttttggtctgcttagagaaaaccacacacttccaggctattctgcctctgtacatttccagccttccttgaaacaatcatctcgagaactgtgaaattatcccgctataatctaattggtggtgaccactcagtccctttgcaccagagaacttgtatctagcaagtctctttctttcaaacatttgttagttcgttaaagatgttatgttagcagtaggatatgatgcatctgagaaggaaataaaagaccaggacaaaagacatgttgaatagtcaaagatgagctgtaaccatcagggaacactaactgtagcacctgattttgattgaaaaacatgataacattggctttgaagttgttgcagatctgcttaaactttcttcatggatggaatgaatgaaaattatgaagcattgatgtaaaaataattgtttttggtcttttttttctttgtagaaaccaacctgccttccctccctccctccctcccttccttccttcctccctcctttccttccttccatgcatccatcaccagtcttttcttactgtacaatttccttgacagatggacttcttgtagaagtttacctgagtttaatacgggtgaccgtcatgggtgcaatattttgctgcaggagatggaaagacattatttttttttcctccacaaagttgtatggcaggaacatgtaaagctgcatcagtagatcttaagacgcctgttctcgtgatcttgttctcactttgcttagaggtttccccaaggtaatattaataaggatgtatccagtagtaacagatagttcattgactctattatttctgaaacatgtattgtcttttacgtaatagtagttactgcagtcattacagttctttttcttttacatattataactgaagcagtttctgttttttttaacaaatacaaatgtttaaaaatcatgacacttctttaccttgctgcccattatttctcagcagttaaaactttattactttactgacagaaaaaagaaaggatgaaaaactataaatataatgatatagaaaatctacagtatttttaaatgtcatattttaaagatttagtctctttaaagtgagtttttaaaatgaattcatataaataaatgcaaagtgccatagaagtaatgaggaatattaaaaatatttcaaggtttttaaggcattgggaaatatgttcaagactttgaaaacagagtccaccagccatatcagcccgtttgctattcctgatgtttgtattttcttctggaggaagaaagattaaaaagtggatcttgttttttaattctctgcattagggagtgaaatactttctctcaccgaaagataagggtaatcacagttttaaaaactggctactccttacatgcatgtacccttgcaaatcctgtagcaactgaaaaatctcctgatagatgtaaaaattaattaatgtcttactaccatgcaaagaatgtgggcataggtggataacggtgactaaatcccacagaatttgtgtggcttgcctactaaacctcgagtaatataatataagtgaaagccaaaaccagttttctgttgttttcctctccagcttgttctttataaaagttggacctgtttgttttgttctctaagtgtgccatgtgcagcacgcctgtgtaattcctggtccttggagcagactgcggtgtgcaggatgcccgtgcaggatttgggtggctggaactgacaaactgggattagctgacctcctgcaggaggctccagtggcccctcggccgtggtgagaaggagcagagccttggtgtgtatgtgacctctaacagtgaagtgatgcctagttcaccgataccacttgcagtaacctgaatgactggttattctggtcaggagaaaatagcactgacatcatgtgattctggcaaagtaaaccacattggaacttggcctttgaatacccaaggggctggcagcaatctcaggggttggctgggagccccattgagttcactagtaatcagttgactgctgagctggacaagctgccctagtttttctgacaagctctgtctaaaagaatgatgggcagtctgccattaggatttttaagcagagttgctaaagattaactctttagctactgtaaatatatcatgtccttcgttatgtgttggtatgcaatcagatgaaagcttggagggaggttctaattcctcattcagtgattgcacctggagttcctctcttgtaaaacaaacacccaaaggcaaggaaaaacaccgtaaagttctttgtatgtatgtttcaaaggaatgccagtggataggtttttcttgaggtttctagtttgctttttaaaacaaaatactataatctttaattatgtaaaatgttagatgttgcattctgatcatacttcaggaatagacatcacctaagaaaagtctctgaaaaactacaagcatttagtatttacttattatgacacatacccatggatttcattttcaaaaaaacttttattaactcagagtattctagaagaaaggaggtactatactcaaatgtcataagtccagagaaaccaattcttttgaataaacgtgacttctcaatggatttatttggttatcttttactagaaaaggtgataccttagtaacttttattccttctctcacatagttaaaataaaatataattgacagagatatacaggttgacttaaaatattctatatactgtaatcccggtgatgaatttggtatgtttaatgttgctttaaactggaatatttcctaaggcatactctcttttctctaggtaactatgacataagcaagggaacaccaaagttctttgatagtgcttcagcactccttcacaaaatcaaattgaggtagtagtgaggccactgtggggatgtagtagccaatgatgtatcatttatcttgggacacacctgaaagttttaatggcaaaagctgaagttttggaaatctgtcttccttttgagctaaggctttaattctgcctcctctttgatcttcccttccaaaaagctgcctttgagaaatggtacaatttctctctcatgtttaagaggtttgtgacattagctacctggggacattattgtccatcagagaacttacataaagaaaacaaaaaaagatattatatgcacagacactgtctaatggattcttcctgtttcccactcctcttatcttccttgactcagcacaaaagtgctcaacaggccataaactcaaaagaccctcctccctgttagagctaaaaatcctgcgtgataacctttcagatgctcagttaagggcaaatttgtaactgagttttaaaacttggtgtgttaccctaagacttatcaagaaaagaagaaagagactcgaggggttttgaacaaggagttaggaataggtgaaactttttatcatgtttgttcctactgtgtggggttttgggggagtcagaaatggtatccacaagactttggcatttatgatgatattcctgccttgttccggaattcctctatttatccctttgcatgaggacagtgtcaccactgtctattgctaggccctaaattatctcaagaaagggcttaagggtggtgaaggggttgtggaattaccttcccctctcacttttccattctctcttctgccctctccctccttcctcatttcttttccctttactctccttccttcctctcttcttctcccctccctccctctctctcttccttcctttctatttttttacagtacttgctaagtatctactattgtcagtgaatgcacaatgatatgcaataatcatgatagacgtaaactgaggaagtttataagataatgggagaaaacaatttcccaaatcaaaggatcacaaaaatgcactttagcctaggcaacagtgagacgcaatcttaaaaaaaagtagaatgaacaattgtggtgaatcatttggtgaaaaggcacatgatgctataagagcataaaacaaagggatcttataaatatgtgagatttccgagtaatactatttcttggtaatacttaagaaaagaaaaaagctaaatcttaggtagtatctcatctccaccacttactatttaaacttgggcaatttgtttaagctctttgactcataatttgcttatcagtaaagcagagataataatatctacccccatcctcagtttatgtaattggaaatactaaatttgaaatatttagttgacgtacagtgagaatttaatgaaaggtatttcttatcactaagttcttatttcagtggtccttttggtcactgaaaggtgtcaaattcttgctgctatttggtttgtatattaattgcaagtgtaagaaactgaagttatacagactgaagtgagaaagggagattattctctgatgtaatttaaaagtccagtttatctgcaggtacagtttgattcaggtgttcaaatgatgtaactgggaatgtttctctgattctcttcctatgccattctctttgttcccttacttctcgggcaaagagggtctctttccacagtgaaggcttatattctattagccaagcaaacccagtggggaggaaaatgttcccttcctcactagtccctgcagacgttcctgggctggatctccttggactacccctgaacctgttgctgaactggtgctttcttctctttggctatgcttaagtctcctgcctgttcttggagaggagctagaggaggatcacgagacacccaaactacatgatctcagaaagtggggaagagtggcttcccagaggaaaattattgttattactaacaaaaagtaatagaggccgggcgtggtggctcatgcctgtaatcccaggatttggggaggctaaggcaggaggactgcttgagttcaagagtttgagaccagcctggacaacatagtgagatcccatccccacaaaaaaataaaagattagtccgacatggtggtgtatgcctgtaatcccagctactctggaggctgaggtgggaggatcacttgagcctgggagaccaaggctacaggaaggaaggaaggaagaaaggaaggaagggaggggaggggagtggaggagaggggagggcagggcagtttaggtgggaaggaaggaagggcagtttaggtgggaggattgctaggatggaaggaagggaggaaagaaggaaagaaagaaagaagtagagctgaggtgggaggattgctgaggccaggagttcaagaccagcctgggcaacatagggagaccccatctctacaaaaaaattcaaaagttagctgggcatggtggtgcatgcctttagtcccagctactcaggagactgaggcaggaggattgcttgagtccaggagttcagagttacagtgagctttgattatgccgttgtactccagcctgggtgacagggagagaccctgtctcaaaaaaaaaaaaaaagaaaaaaagaaaaaattagtagatactgtgtagacaacacctaaacaaacagggcagatatctactgtagattttaaaaaataataagaacaccctgttcctgcttttagtttaggtagaagtgaaactgttaatgaggtgacatcaaagcatgcagagtacccactaattactgagtcttgactgtatgccaagcagtgggccatgtacttctgtattttatttctgatcttcacagtgaccctacaaggtaagtattaaaatcttgctttaattttatatccagtgaaattatataactttttcatggtttttcagctagtcagtggtggcggtggcctttggatgcttgatcatccttttgccctgcagtggtgcctgtgcagtgtcagatggccctcctgacctggagcagtgcagagacgtgccatgtaggcctccatgactggcacattttcctgtgagaaatggagtagtccttttttctaggtcagggatttgaaaggcaggactttagaatcctgttctgggcatggtcactgcctctccctgcattattggatggcgcatggaaggcctccaaccattagctggatctgtctgtaaaatggtgacagtgttaagcttttgagagattaatgagtctgtttgtaaagttaaatacattgtgcatcataccagagacagtctcaccacttaattgtggactgttcaagttctcttgactatggtataagtcctagtcagcttgggttgtcataacaaaataccatagactgggtggcttaaatggtagaaatttcttttctcacagtcctggaggctgggagtctgagatcagggaattagcatcattggattctggtgagggctctcttcgtggtttgcagacagccacctgcttattgtgtctcagaaagcagagagagagagagatatagtgaaagaaagcaagagagagagagagagatcaggcacattggcatctcttctttgtagggatactaaacccgttttaacaggccttcaactttatgacctcatttaaccttaattacttccataaagaccctgtctccaaatgcagttacactggggattgggtcttcagcatatgcattttcagggacacagttcagtcaatagcagggtgatattagtggttttctgtgaaccacacatataccttgatatttcactctagcctgttagcactgtcagtggcaccaaataagagggtttggcataggatgtttcctaatatttgcctgttaatttgggggaaagtaattggaaattactcactgaagttctcatttacagcaaaagctcttcaaaaatgatatggcaaacatatgggcattcactctacaaatccatgtatgagatgtgtggaaatagagctatcaacaaagggactgaaggctcagaggaggacacaatgcagggttgattaggaaggacttcagcagagtgaaattaaacttgatatcccagggtaaatgggattttgcagggtgaagggcagagaggcattttggtggctggctggagcacagtcctgtatgaaggtgtagtgacttcctgtacctaagacaaagggatgtggagagcagtgggagcttcctcccatctaatgggtcggagtttagaataccagtgccttgccaatgcaaggtattggattttatcctagaggcagtggaaagcccttgaaggtcttatggaaaagggaaagtgttaaaattaggtctgggttttagactggcgagttttaagtgtaaacatgttgattagagagcttagagtctaacccacgctgtccctgatatctagaatgccttttcctctctaattctcaggaattagagaggaaaaccacacattcctgttcattgcacacatttgtgcaaccacacattcctgttcattcttcaaaacactcctctagagtgatggatatttacagtaaactcatttctgacctgtctagatggaataatcactccctcctctgtcccacttttataatttatgtgtacttattattattatcatttttcgagacagagtctcgctctgtcacccaggctggggtgcagtggtgcgatctcggctcactgcaatgtctgcctcccgggttcaagcgattctcgtgcctcagcctcccaagtagctgggattacagatgtgcattacaacgccctgctgatttttctatttttggtagaaatggggttttgccatgttggccaggttggtcttgaactcctgatctcaagtaatccacctgcctttgcctcccaaagtgctgggattacagtcgtgagccactgagcccggccatgtgtacttattattgcttgtatgacattatagtataatcatgtgtttacgtatctctcccactacttgaagaaccttgagagcaaaagggttgcattttttttgttgccgttggttttttttttctgttttgttttgttctgtcctggtttgcattcagagtatatggtgcttggcatatcttaggtgttcttgtttgttgaacataaccaagctaagacttctgtgaaagtcaggagagcagcaagaaggacataggaaagcttgtactggtaggaatagaaagaaggaggcatattattatggatgtagggagaaggagttgggtgtgactgtgatgtttctaatttcgtcacctgggtaaatgttagtttccttaacagaggcagtggaagaaccactgagtttggaggtgagttgttcagtttttttcttctaggttgggtaggcatgacccaagtgttgatgtctgacaggcaaatgaaaatacaggtctgaatttagctgttgttatcccaaacctttgaagccaaagtttgattgaggttgcagagggtgataaagagaaccaggggaatgctgacttttagaagaattggagttaatacaggagaatgatagtgagaagtcagataagtaggaggagaatccggacaccccaatgtcatggaatcagagatgagaaattaggcacatgctgcactaatctaggctgatgtatggccagagacttttatcatgaaagtactgtgtaataataataacagtagcaagaacaacaataatagtatttactatttttttagtacttattgtgttccaggcattttgctcaatgttttttctacatatcccatttgtttcaaactttgagcctattatctttgtttaaatagatatacaaattcaaattcagagaggtcagtaatttgtctaaggccaacggctaataagtattggaactgggcatggtttgtgaactttgatatgctgcaaagttactaagcagttattttattttttggtggggatctgtctatggagattgtggagattaaagttatcggtaaagcttactatactcattcccattagctcagaagaaatgtaattctttcctgcttacatggatgagaaagtatgtgggtaagtttcattcattttgaatgtctctcatttaatcagcagattcagaatgtattagtgactccaatatatctgactgcactggtatatggtatatattttaactttgttttctactataaggtcatttaaaaaccattctgacctatcatttcctctacaaatttcttatgcttatgttgtacaaactgaatttttatataatagagaggattatttaaataggaaagagaatcctgaatatctttaagcacttactttgtttagtgcttctatgtggagttgcatgcttaaaagagacatacacaatagccattcttgaaaatatttgctcataattgctacacccttatggatgtgttttcatatataattcaggaaagaaaaattattgcgtatgatagattagtattaccacataatagtactgatttgtgtgtcctattttagtgcattgctaattctcacgtgataactacagtatacggtaatttccatgaaaccagacagtttaattctgctaccaatgtcattttaatgcagttgcagccatatctgtggcttcagctagcccttgtgcaggaaaccctccagcagcaaggatcctggcttgagctcactcagtcattttactcccacatgatgtcatgcagcttagggtttcctggtctttgagtggatgaacatttctgccttttaggctatctgagacgaggttgggatttcttaggacgaacttttacgaagaaaaatgctgagaaaaaaatgaaatacaataagataccataaaaaaatggatgagcacaggtttttgtttttgtactttttttttaaaaaatacccaattaggtaaatctaaccataggttgactttctggctggacttgaaaactcatttatttccagtttgtcttccctcatgaaacacaataaaacaaaacaattccacccccaaacctgctcctcttctagattctcaagggacttaggaatcggggtagaagaaaatggtcaagacagcccacctgatttatttctcttacttatccagatttgttttggaatcacatgccagcttctccaccttcaaatgccttatgatgcagaatattatatattttttgagaaggtaatataagttgctttttcttctctttcaaataattagttatcttttttccacttcatatgctagaagtaaaacaataaagaaacctctgggaattttcattaagtgattggttttcatatattctgtctttctaaggagggagggaaggaatgtcatttaaatttttaaactctagtcttgatgactaaaatgttctcaaacttggttaaatcagctatctctttacataactattggatttctttcagggggctgtttccttaccgacatactgtacaaataaatgcagtttaatatagatatatcttgatgtgtttagatttggtaaaccctcttatctttcaaacatgcatcatttatttaaaatgcataggcatatgttcagaacaaagttattttcagtacatatatattcattagcctgtgtgtgaaagtacatttcaaatcacaaccatttcaatatttgtttttctttccaaactttcttttctctccatcttggtttaattgaaccctagacctgaactctttaaagcattcctatggagccagggtacatttgaatgtctttgactgatataaaataattgctttgttgatcatatacccatgcatgataagatatgcataagaagaaatctggtacagaagtataaataatacttatctttaagccagcatctgtcatctgcttcagcagacagtgcttgctttcttcctagcacaaaaaggcctgaaagatttatggagcagctttgtttgtgctctgtgatgcttaatcaatttttattaaattctaaagtaaaacttggctttcacttcagtgacatctctgatgtatagaacaaggggagagatcatgatgccctgaaaaagttaggcatgggtgatctaaatccccaatctgtttcttcctgcaggacttcttgcaataacttttgtaagtctgaaggaatccttgtaggtttgcaatggaaaaagcaaatacagcccaaactttagacttttcaaacttctagagagtggatatttgtaatttgttttttaatactcatgcatatttccatatgtgggaaaaaacacataaattctttcaatgtgcagataatgtgctcattttgcattcagaatcatctgaaaaataaagactcactagttatgtttacagagaatcttaaaacttttggtaattgaggtttaacatattaaatatctgatagacatgtggactctgtcgccttttgctggctggtttgccttataggcttaacttctggaattttttttgccttttcaaacaaattcttctggttgaatatcagcatatggtaggaggctcactctgagacaggataatttataaatgaccatttcttgtcttgtgatcttatgtatataaagaatctagagtcatgagtcaaattgggatttttgttcaggaaaaaggttaaaaaattagacatacaattggctttctttgattctgtgtctataaggagaggaagaatgggatttaatttaaaatatatttctgcattgaatactgatatttctgtttttgaatttgcttttttttaacatctggtacacaccagactaacctgtacatattattcctttggaagcatatggttgtgggccctgatccaaaagtagcttatgtatctacatttcagagtgtaaagtttcttgaagaaaggtggggagggaacaactatgagatatgttgttaattattgtttattttctaggaaatatggcaagctgtaaacttaagatgacaatatctgtttttttttgaattatgtaatatgctactttggagaaagtcgattaaagaaaaatttggaagccaattcttacgtgccctaggaaaattaataattcatgcagctacttctgtcctatcagtcatcttttcactgccacatttatacttatgtattatgaactgctgtttttttagttataaatgccacaggtagatatggatgttgatactgatatagtctatttatctacttattacctaaaccttgatgcatattcttgtatttacttagccttggtaatggcctggtccgttatgcatacataactattgaggcagtttttgaggttctggaattattcaaaagacctggccagaaatggttaaatggcaggtaattgccgaatacatttgcccctcatttgcctaaaaggtattcggtgcctgagtgtattcttgccatgtgctttctttctcagctgcggctgattcagaaagacccattggaattactgtgagagtagagaagaaaccctgaattaccaaaatgaagacagccctgctcaacttgatatgcaaataagctttgaggatacagtttagttggtcctggctttctaacctcagagctccatcttacgctgtcacttgccaatgctacttcattgtgatacttgcagcctacaaagctagagagtttgtctgctttctgtggagtaattttgagtagatgaactgaggcttgggagagtttgccaaatgaggtggtgatgatggctaaagagacttggacttagggagtgctttctggcagaagtacaacgcagacggtatcatgtttttgaccatggtactttagacatgctgccaagtgtttgtaacgagatagggctgttactatactttgcttttaactttacttttgcatacagtacatcgttcttgttttataaactgtgtcgcatactttttgtacctctataaacaagtgaagctgttgagtttttggataaagtttgaagcagtcttgtgttgcttcttctttgctttatgctccaagttgagagctgaatagtaagatcttttttcacaccatttataatgcgatgcacattttgaaggcaatttaaattcttttggctccccagccatatgcttcaaaatggaagcattatgcatgtctgaataggggactaggtaggaaattggagtataaagatatatggcaggatatatagtagggtaatattatctattgagagagagggagagaaagagagagggagagagggagagatggggacagagagattaatttcactctctaggaatttttccaaactttaggcccaattttgctgaagaaaatttaaaatgtttccataggctacacaggaacttttatgtatgcaatttatatatttaatgaaattttggaacttgaccagtgtattatttgagaaattggcaatatagtcaagagtaatggactttaaggtataatttttaatggaaggacaaaactaatataagtggaaaccatattcctcttcttttattacattttttactcattcctttttatgattttatttctcttcatcctcaccatcccctctaaattttcttcagtttgtttctacattggaaaagtgaaatgtaatgttctctttaacatataaactcttgcactctctccctctggagggtatctttcactgttttcataatttattctgctgggtagaaaaccccagattcctccaatattctgaaaataatttgtactttttgtagatagaaatttcctgtttcgaagcttctctcattataatcgtgtaaggttcttgtggttatgcctcattgatcacatggatatcattataaaataatttggctcatatttggatttatatgtttatgtatctttaagttagaacagagattcctttctcattcttatttaaatgttgttttcttatcttttctctttctgttttccttcatagataataagtgacttgtagtattagatcatacacaactggtagtttcttctgtaactttcatcagaaatgagtattgtgtctatccaggagttcctgcactttttcctgaaggaaacagtttgtatgttaagtatacctctaaaccttattcatttgaagtaatagtcttagaacatatacacatgccattttcctcttttcctctctacaccgtggatttggaaattatggaagctttttacaaaaagacctaatgggatttatgtgttattttctttgtgaccattgtgtgaaaacagttttcaaagttaagttactgttctcctgtgtaacattgtgaatacaaaatactacaaacctttttggttaaatgatggaggagaatcaatttgttctttaggacaaatttcttaattttagtttcttagaatccctatgtaatgggcatattaccgactgctcttgcagaatcaaatgtaactccttttcctattataaactatattgtataacataacagcttttgaataattatcatgtgatgtactttcaccatcagttgaccttatgctgtttaggagacaccagggagtcctgggaattaggaaacaaaacagagaagggaagaaaaaaaagcaggaactgaatttccttcattcattcatttatttttgagaagggtggagaagcccacagatttatatctcggttgggtgaaattgtgttactgtttatctgtacctttttccccctgtggcaagagacgtggagaatagacactcactcccaaagataccaagttccaaagcactgagtcatgagtccacaatgaaatactaggatgcagccatttcctacctttgtttggaaatgaactgattggaccaggcggatgtaagccctcagctgcagggctttacagaaggaaatgcttttggtctctcttaggtactcgatgctgttctgtaacttctttgtatttgactgaaacaaccaatgtgaaaatgtttcctagactatataaaattcagcgcatgcacccttctgtctgtttgtgcacatatactttttatgtgatggtagggaaagcatcaactgcttttaatgcagtgaatttttaatgtaaccttacgtattaaactcttcacaagactgtctctcttgagtagtctcatttatatttgtagcccctacttttagtggtgacttccaggtgctgtgtgatctgacccttgcctccctctccccagtgagtcactctgcctgccctttcagtagcagcaatactaccatccctccagtacagctgagcctcaggcactttgctctgtctgtcctttctgctgggaaccgtttttttctcagatgatcgtaggtagggcttgctcccttacctcattcagaggaagacttaaattacatgtgcccccaaaatctcctaccactccagctaccactctcttcttcccaggtctttttctccttaccctgctgtactctttgccccatagctacctcacatatttcatattcatttgtttcttggtttactgtttcttacccctcctagaccgtaagcctcatgtgggttaggactttgataatctgctgttttgcccagaacccagaatatggtagaatacacacacacacacacacacacacacacacacacacacacacacacactgttatacctagcagggtgaggagcttacacacacacacacacacacacacacacacacacacacacacacacacacactgttatacctagcagggtgaggagcttggtagatcaataataaatgtttattgaataagaaacaatgtagatcggcaagagatgttgctgacctcttatattgggctatttgggagttatttaacttttggatgcctcagctttcccatctggtatgtggggacgagattttgcataccttggaagcatgttgggaagtctgattaataatgagtagtaatcatgagcagtgaaaagatcagacaccagctctgtttaatgagaaggtacatagacataatgaagagcttttgtgctcagtgggcaatggtatatcttaggtggccaagcttttccctgtgtgtgctggccttcggcactttttgggtgttagggattttgatgatcttctgaagatggatgagaagagggctaagaatggctaaagcttggagaataatttggggagtcacagtaaatcaataggatgagatagatgaaagaaattggctctaaagagagcattggaagttttagattgtcatatttaccaccttcagttctcagacctgatagttttcagtgacgtagccttttaggaatttcagaagtgtgattttaccttgaatttattagggctaaattcaattgtttatgtttatgcagttcataattttgcagtttagtttgtgtgggttagtggccctactgttcaactggatggcaaatctgtgctaggaggataccatatgcacaagtattttcttaaataatgttggcgtttgccactggtgttaggggaagaagaaaaaaaaatgagagcaattctggaagccctccagtaaggggttaggaaagaacttagggacaaatgctcctacttggaacacaacaccaaatagtggcttttttgtgtttttatttttttttttttaaagagaagccaaaattaaacacagtagagtttactgtttgctaatcagcatgtgtttactttctcttccaaaactgaagttgccaaccaatacatttcctacccagtgctatgaatctgtccaaataaacatgggaagtagtgaaacaatgacaccacatgaaaaatatatccttattcattaaatagaatccaaaaaattctctggaatttaattgtagcaatgacgtgaggactgtctggtctattaagagaggatagtgacttccctcttcagttagtccagcacggatgagtgtgatcttaagtggctctacaattccacatgcatcgtcctaaatctagatacatgaaaatggatcatttcctatcaacccctcactcacacccgtggactctagggcatttgtggtagagttttatggtaattacaaacataagcagcttgtcagaattcaaataatcaattttaatttctgtctcaatcactaaagattactgaccactatgatgaaattaaggagtgctttctctggagattgcaaacacaagggcagagagaagttagaagcttctattttgtggtcagttttgaaaaatacagtcaaaagcagtagccataatcaacattatagagaaccttaaattcataaagatgccaatttagctattagtgggcagttccatataaaactggtagctataatgcgtacacatgtctttgttaaggggctttgttgtaggaatggaagatgagggtatagtgattattgtgttatgatcaatgctattatttaaatatgtctttaaaaaatatcctgtacactcttgatactggagcccagcctcttgtcttccatcaaaatctgcttttaggaaataatgcaatatcaggcattgattctttattgtgagtttaaatacataatggtgagcttgcagtagtaattgtgttaaaaacccagtgggtaaagtttcatagttaaagttcaagccttggggataagtggtgtttctgataaggacaagcattccttctgacaaaactcttactgcccaggttactatttttttctttcttgtacatatcaggtcctagtgatgcttctggacgagcctcaaaacaaaaggttgttcattctttgaaggtgatttagcacctaattgtaattcagcagtacgtgaagattagagttgttctatctacagcagtacaacagtgctttttttaaaaataagaaataaattaactgaacaactgtgcttcgtaattcttggacttaggtaagtgacatataaccaaataagagttgtgtataaaaccaagatgatagcccatgaaaacccaaagggatcttttagggtgagatagtatatgtcaaagttgtcaggcaaactgtataaacttggttgttgcctttattatctattctaatcatttacagataaggaagctgaggccttcagcactaaggtctcacacaggcttttacagctggtgaggaacaaggtcggggctggcaatactgggagttcctaaacacaaaaggcattctcctctatcagtttgcctcccaagttttaaatgatgtcctttgaacatcagatcgcctttatcaaaaaatttttaagcctgaattttaaaggaatgagatggagtgaattagtgtgaagtctttttttctgagcttggtgtttattctttattttgttttcaatcgtataacattttctgtaatgtcccatttgagtaaagttatcattatcctctataggcatatacttattaagtacctaccagttgtgaaaccctaaatagttaagattgccacatttgaactgcaagaataatgaatgatttaaaagtctaaaagatttggttattcaacatttgttcaaaaagaccaaatgagcatatgtgaagctatttttttttgtcccctggttgatccagtgatttcacctcactattgttattctgatcctcttggatctggtttttaaaaacgtatgttgaaatagttaaaacatacccaaaaaaaaaaccaaaaaaaaaatttcaacgaacaaatgccagcaccaccaagtttaagaatgtttaataaaattttagttaaattgatgtaaattaaattaaaaatatgctagttttacaaagcataactaacaaaatgttaaaaaaaagagtagaccaagtgcagtggctcacacctgtaatcacagcactttgggaggccgaggtgggcagaggtcaagagtttgagaccagcctggtcaatatggtgaaaccctgtctctactaaaaatacaaaaattagctgggcgtggtggtgcgtgcctgtaatcccagctactcaggaggctaaggaaggagagttgcttgaacgcggaaggtggaggttgcagtgagccgagatcccgccactgcactcaagcctgggcaacagagcaagactccattaagaaaaaaaaaaaaagagtaatgataatatacctacatgcctcctcttatcaatctcattccttcttatcctactacaccatgaggtagcttctctcttaaatgtggtgatttttgttctagtacttttattgcatgtacttctgttgcagatgggtttgtgatctggtttttgatgctgagaatgctaatctctctctgccatccaatctagagagtaatcctctgacattttaccttaggataatttctcctaggtttgactgttcaataagtcacaggactgcaggcttcaatcctggattttccaagagtcacagaagttagctctaagtctcctttccttgacatgtaacacaataaaacaatgcccttgactcctgttttgctaattataattgataggtgctttctataagtaaagcatctataagtaagatgttatataaattaaacaaaaattttccttttgaatattggaatgagtgctgatggtgacaaaactgccctcagagttattatttcagatcaaaattgatagactagaattaagctacaatatttcagctcagactactagttaattttgtctttgtacatatgctcacctttcaatatttgtagtttgcaaacagttattaaagaataatagcaaaacaagtctgggcccagtggttcacgcctgtaatcccagcactttgggaggctgaggcgagtggatcacctgaggtcaggagtttgagaccagcctggccaacatggcaaaacccggtctctactacaaaatacaaaaattagctgggcgtggtggcctgggcctgtaatcccagctacttgagaggctgaggcaagagaatttgcttgaacctgggaggtggaggttgcagtgagccgagatcgcaccactatactccagcctgggcgacagagtgagactccatcttaaaaaaaaaaaaaaaaaaaaaaaagaataatagcaaaagagctaaatactgggtgtcagacttcaccaaagctctttatggttaaattgttagatgtttttcctgaaaatttttaggatcactttctgagaaattccttcacatctgaaaatttcagcttccagtttctcatgaagggatataaatagtttaactattacttacatttggaaataaaatatttaaggcaatatttgtgtgattttgcattttcaacacaacgtactatctttatggctaaactacatgtctgtaagagatcttttgaagagcagtaatgacatcaattgtttaggaggtaccacgagttaaactttctgttctttgccttggttttcttaaaaagtggtgactttttgctctatcctatcaagagcaagtgcagcatgtgttagaagaaggaggaagccagaggcagacccgccctcttgacctgtcccactgagcatgccagtttgctagatgggccctggccactgtggactctgctttagagacctctgcaaataggtggtgggcactcctgatttctttgattatagactaggatagttacagactatagtacataggcaaaacaattgaaataaacatttaaataaaataagttaaatagttcaactcattataagaacttgctacactttaggattctgtaaatcacttaagagtcatagaaaaatataaggattctgctccttaaatttctcatttgaaagtttccaaggtgaaaagaattcttagaaaagaatttaacactgacgctgatccttagccctctaatactttaaaatggacttccagacttcgtttctcacacctggcaacctttagtcttcctgtctcccttgtcttaacaagttccatgatgtgaagtaaatctgatggcttttgtttatttaatttttgctttccttgagcaggtaggtggtgtgtcagtagctgagtatcttctttcctggtggcaaatgatttagaagaatccaggaccactgtgcatttggtgcgttttgcagcaggaagacaggcacacacggagttaagcccatggctgctctgtgttaactgaacattcccagtgtgacggggtcgtaatccctaagcagatgctttacggggtctcattattgtccagaagtggctcttgtatgagaaaaagcagccatgcagaaaaggcacaaacactattgacttgcccaccatggcatacgtttttttcttcctaacatccatgaacccatttcattcttacctagccatggtgtcgctccttccctcgctacacctttaactcattaaaaatcaaaaacagaacaacaacaaaaaactagagtaaaatcatactgttccatactgataagagactgcgatttaccttaggatcttttgagtgtggtgttgttggcgaagaccttgtttctttcccaagtctttcagccacactgtggcctttcaaaacctttaagtcctgtaatagtatattttgtgaagaaggggaaaaatgagatttttttcctccttgcttttgttaacccattcttgttttagactccaacaaaaagggtttttgttaactggagcttaaaatcggccagcttgcaaagtattctctctttttatgcaaggaggattagcttgacatgttatgcagttctcttgtaggagccattcacgtgtcctgtcataaggtgtataattactgcacttcaccatcagcaatcattcttaagttaaaacctgttttaaacctctcattaatataaatcataccagcaaggtagaaaatataccttcaaaaagaacgaactgttagggagttaatctgttcttttcataatagacctggagtaaataatttttacttagcacttttctttctatgcaatcaaaatagtttgtgataaaagatctggtacccgggattgcataaatgtgcagtgttttattcaggcaggattgggcttcctgcttggtgccagcctcgttttccctctgtcacccttgaacagtgaagtgtgtaatcctccattcttttacagtcagccctctgacaggactgcctctctctccctctctctgcctttccttgtctctctccctctctctgtctctctcacacatacttgctcatacagataaattcaggagcaaatagtttttcttttcagggctttctcccagtgaattctcccagcatgcttagatagcaatctgaacttacaaacaaatgtctcaacgaatatatatatatatatatatatatatatatattttttttttttttttccccatggaaaaactgtaggccaaggactcagatatccctgttgtatttatttcttagtggtttgttctagtgacagagtggcagctctgccactacagcttgggatcctcagttactcatcttgcgaactccatttctccgctccccctttgcctttcgccaccagaatccacatgccactgcctcagaactgttctgagggatgattgtggaaagttcaatccaagctgggctttccagggcagtaggctagtcagtctcaggaaaaatgtctccaattctttgcacattgtgaaaggcccagtttgatctggattttacccacctttccaaacttgtttctcacttttctctctggaacttctgcctcatcgtctgtacaacctgcttcctctttaaatttgtcaaaaagtgctacttttttctacctaaatgccttcacttctattaatcccatttcctccagctaatttttattcaccctttaagtctaagcttaagctaatcttccttttctctttcatgtatttttagttaagtgcgtactatgtgcctgaaattattctgggttcttgaaattcagggttcatttggatatagactatatctctgctctcatgggacttacattctaggagaagccttcaacaaagaagtcttccttgacattccattctgttagcgccctttattttgcatttctgttgctctctaagtttcttcatagcattttattcactctgttaaacaaatatttgttaatacccattggaaatagtcatatagcttggacaagttctgccttccctgatgaactcaaagctctatgaggacatgatctctgacatatgtctatccaggaagatagaaggcaattcatagaacctgaatgaattaataaatgaatggctttctccctgtccccaaatattataattgtactctgcctgaattattttataccattcttttatactgtcttaaaaataccactaattagaaattcatcaggtcaggccaggcacagtggctcacgcctgtaatctcagcacattgggaggctaaggcgggctgatcacctgaggtcgggagttcaaaaccagccatgaacgacattggagaaaccctgtctctactaaaaatacaaaataattagccggacatggtggcatatgcctgtaattccactactcgggaggctgaggcaggagaagcgcttgaacccgggaggcggaggttgtggtgagccgagatcgcgccattgcatctgcttttctttatcacctagcagatgttagtggctgcaggatgggaataaaagtcaggttgggaggggatatttttagagcctggaacagagagaggtctaagatggttggctcagtgagggtcttgcactgggccctgaagcccggaagggaaggtggagaggagtgcaaatgatgaggaaattaagcctggcttccttcaagaatttatgtaaagctgagaactctgtttctttcttcttcttcctcagcagaaaggaagagagttaaaattagtaaagatttttttatgtgccacaaactttacatacattattttatttaaggcattattttatctccagtttatatttaggagccaggcctttttaattccagaattagtacatgtaaagctgacactctgcagccttttggtgctcaattaatgtctactgaatgaatgaatttattgtagaagtacttgatctcccatttggcataattcttcataaggccatcgtctttagactcagaattcctgttggtactattggtatgatggttgagttgcattcaggattgaattgggctttgcgtgctggtgtaacaacctgatcacctaatatgttattggttcaatagaattcattgagttccgaccattaacttaccgatgagcttttagagcacgaatcaatagtaagttggagattacctgtacgtgaatgtagaaatattataaaatgaaatcgtatgtagttgattttcctgtgatatttagggcacttcttttctcatacttagtttaagtgaatttctctactactgtttttttttttttccctgtaaacctgcccaaagcgtttttacaagtaggtggtacatataataatgattataataaaaacaactacctgaaaatttaaaaagaagtaaaagagataaaggaatttctaagattccaaaaagataagatctttttatgtgtccccatttcatattgagtcacctggaacatggcattaaattagttttggtttgggttcatgtgaaagagaaaccacatgagtaacacactctaataaaattaaaatacagttacaaagagacatctcagatggactgaaaaagccaaacagtcagatcctttcttacgtagtggtaaagcctggctagaaaggaagctttttcattagaatattttcaaaatcaagcatacctcaatttgcaagcaatttgaatttatgtggaattaatatagcccaaataaattaaatgaacaattaaatgtttactgttttgaccactaaaatggagtgtggcttttgtaaatgggttcgagtggaacattgtatagtttagatgtgggaattactattaagaatcgtggccggatgcggttctgggaggctttgggaggctgaggcgggtagatgacctgaggtcaggagttcgagaccagcctggccaacgtggtgaaaccttatctctactaaacatgcaaaaaattagccaggcgtggtggtgtgctcctgtaatcccagctactcgagaggctgaggtgggaaaattgcttaaacctgggaggcggaggctgcagtgagccgagattgcgccactgcactcctgcctggatgacagtgagaccctgtctcaaaaaaaaaaaaaaaaagaatcataaagtttattatttcaataatctaatatctttgatgcatatgattctgttcctatataattatttttaaagtcagtagtttaacacaatagctttagattccttctactggttactatatgtcttcaaaagatagaaaatgcaaagttgtatgagtcatctgattaaaggaagagtaaatgaattattaatgagttaaaaataaaaacttggatacttgaaaatgatgttgaagtatataaaaataaattatgtaaaattgatttaaattaacaccataataagacatgaattacttcaaaatactgagaggttgagtggctggagcttagactccagaggttcagaaggttcctctctgcagctaaacagcaatattaacttgggcacgttattaaacccattgaggcctccctttcttcatttgtaagatggagttgatgatagtatccaccttgatgatttgtattgagaattagagtgaaacattgtgaatcttgttacaaaaagcttgcttacaattgacatatgtaaggggtggttattatcatcaacaacattggagaaaataaattttttttaaaaaaaccatgattacagtaccgttgtaaattttcatgccagtattcatattacttaggttcagggaaaataactaattcatgaaaatccaaagtaggtgtgcctttctccatagtatgatatatttcaagtctatggagagatattcaagaacaatgttttccaattcattggtttttaaaaaattcatccatgctttgtttattcaacagatagttttgagtacttcctaatatttcatgccctatactgacctagaaatgaaaagcacaggctctatcctcaaggatatcacagtctaaaaataagatctcaccagcaaactgggaatccatttagacaatgataggtggcagaaatctttcaactgataaattagcttttaaaattggtagtagttttctgcacatgtttagaatatatttcttttcttttactttacttttctttctttttttttttttttttgacacggagttttgctctcgttgcccaggctggagtgcaatggcgtgatctcggctcactgcaaactttgcctcctgggtacaagcaattctcctgtttcagcctaccaagtagctcggattacagacatgcaccaccacggccggctaattttttttgtatttattagagacggagtttcaccatcttagtcaggctggtcacgaactcctgacctcaggtgatccacccaccttggtgtcccaaagtgccgggattacaggtgtgcaccaccgtgcctggccaagatttcttactctcttccacaacttccccacccatgtgagtttatgataaattgggaaaccatttggaatccaaacaaaaaaggtgattttaattattagtccatcgaaaagacagaattaccagaataactacagttctttatttctaaggtttctttggctgtattagtctaatatttatttttaaaatgtgattagcaattatctggactaatttttaaatatatgcttatattaataaagctcataagaagtattttttaagactaatatgcttatatattcattgctttttttttttttttctgagatagggtcttgctctgttgcccaggttggagtacagtggcatgatcatggcacactgcaggcaccaccgcatgcgttcaagagatcctgtcatctgagcctcctgagtaactgggactacaggtgcatgccaccctgcccggccaattttttagtttttgtagagatggggatctcactatgttttccaggctggtctcaaagtcctggactcaagtgatactcctgcttcagcctcccaaagtgctgagattataggggtcagccactgtgcctagcctcattgtttttgttgatggtcgttttacctaatagactttagccaaaaaaaagttatccaaatattgtttattagcttgttaaaagggagatgatccgtatctcaatgaataaatattttcagcctgtgttacaaagccaaattgtcatcatttagattttagaaaaaaaaaaatgctctttaaaatgtatagtacataccttcccaattaattattctgttagtgctgtatttaacaatgacagggaattaaagactataataattaaatctgaattagtgttaaaaattttacctgatcactgttctaaatcatatttcaatgaatttttctgaaatgtgattcattcagatttcaaaaggaaataacatgtatttcatcagaatgacaaaatgttatatatacagtcagcataaaagaaaaaaatcattaaaaaacatttggcttggatctttaaatattttgttctgtatttctggattttttttcttttggctcttctggagaattacagtaaagttgagagtgaatcctgatactctgatagagtcaaatctccctttaagccccatgcctatgctggaaaacttactattactttctatatcagactttaatattataagcaatgatgattttttcatgttgtttctataaaatgaaattttatcctaaatctaaagtcattaaaccaaaaaattccaggcacaatccatcacttcatttcagcacaagctcaatcattgctttcaaatctatcatattacctattttcttcttcttcttttttttttttttttttttttttgagacggagtctcgctctgtcgcccaggctggagtgcagtggcgggatctcggctcactgcaagctccgcctcccgggttcacgccattctcctgcctcagcctcccaagtagcacctattttcttcttgaggaggaatgtagtgtaaggatgaacctagtaccaaacaataactggcttcttaagaatgggatttatatatttttttatagcattcttgagataagaagattcttggatatccaaagcaaatgtatttaaaaaacgaggttacagtttttgttctaaataataccttctgttctcacttatatctggaattttaaaatgttggatacttagaagcagagtagaatggtgctgaggtggggaggtggggaaatgcagagatcttggtcagagggtacagagttgcagttttgtaggatgaataagccttgagatttaatgcaaaagttgaggactatagttaacaatattgtaatgtatactggaaattcgctaagaaagtaaatgtcatgtgctctcctataagaaaaggtaaaaaagccaacaggttctttcaaagaaaaatttataaaattgagaaaccacttatcctctcagggaagatactgtattcctattttaaaggtaaagaaaatacgacaatggaaaatacagtcgttccatggtattttgggggaattggttctaggaccgccccaaccccaggccccactggggataccaaacaccataatgctcaagttccttgtataaaatggcatagtatttgtatgtaacctgtgcacatcctcccatatactttaattcatctctacttacaatacctaatacagtgcctacatatcacttcatttgagtggattcagcatagtactcagtgtgcagcaaattggagttttactttttgtaagtttgtggaatttttgttttctgaatatttttgttccatggttggttgaattcatgtatgcggagcccatgtgtatgtacatcattctggaagagactaagatagggcagaacatccaactgtgatcctctacaccttgatttttctcaggacactttcaatctaaatattctctttagttcttagctgttatgttttagtgataagatcatcatggtcttccaatattagggatatatggtttctacacagaacatcatgtggaaactgaaaaatagctgtgatcttagtgaacagaagcctcagcaaatgatggcacaattttctgtgtagcctatcacttgttttccacctttttgtgtattgaatatggccttctgggtcagccagaaatatcttaaaagctgttaattgttcaggcaaacataataagtgtggggactggaaggcgtaattggacgagggacattttactgtttgttttattttgatgtgaccttatttcttttaatattgttttagattattttggaaggcagggggaatcctgtttgctcaagggacaaaatttgagaagatacacaggacagccctcagtgacttcttggccaactagagtgtagtgggcggttagggtggctgataggatatagtgtggctgagaaggaaacaaaccgttgcccttgaggagaccaggtggattcctagtattgtacttctctatcaatcacaggtatttccatttccttcttagattttgatttagtatatttagaggaattgagctagagctgataagatttttctgcgtttgcatttccttgaaattagattggcctctaaccagtcatgtaacacatcttcccctcttcttcttcctcttttacacattgagggaaaacatgatttctcaaaaaatttaacttttgattgatctcctattgaattgcacaagaggagaacttgaggtataaaaagagtcagtgtaattattaaataattagtggtttctacatttttatagacaaatgccctaaaaaaaattggaatgctaatttttaagctttgttctatttaaatttgtttctaatgggtgagaattggacttgctaaaattattacaaatagattgcaattcagaaaagcaatgcagtggagaagttattagtatcatgagtctgaactggagtattacgtagtagtcacttatcagtaaggcgaggacaaggtcagagtagatcagctcagtgacctgcgggaatcataagtgtgcccctgctatagatttctgtcaggaagtccctgctctatcatctaagcatagcaactaccctccctgagcttttatttagctcaagcttgttcaacccatggcctgcaggctgcatgtgacccaggatcgctttgaatgcagctcaacagaaattcataaactctcttaaaacgttatgagatttttctttctgcttttctttaagttcatcagctattgttagtgttagtgtatgtgtggctcaagacaattcttcttctagtgtggcccagggaagccaaaagattggacacccctgatttagctgcataagccactagatagaattccaggtaatgtcttgagggagcagtggaaagaagaaatggattaatgttgagtccaaagagtaggaaagaaggggtgtttgagctggtctgcaaggaatacggatttctttttcttttctttctttcttttttttttttttgagacaggatcttactctgttgcccaggctggagtgcagtggtgtgatcatggctcactgtagccttgagttcccagggcttaagccatcctcccagctcagcctcccaagtggctgggaccataggtgtgtgccaccatgcctggctaattttttgtagcaatggggtctcactttgttgcccaggctggtctcgaactcctaggctcaactgagcctcccattttggcctcccaaagtgctgggattataggtgtgaaccactgtgcctggtcctggaatgcagatttctaaacttaatgaataaagggacagatttacctggaaattagcttgggcaaaggctcagattaccagtttacctggagcttgaggtgcatgaattagtgtcaggtaacctgagcctggaatccaggaaatgacccttaaggaccctgaatgccatctgatgcaatggatttcctcagtaggtgcagggcttgtagatgagggtgcaggaagtcttaggggccatcttagaattctgccttccatggtagataatggggagtttctgccagtgtttgaaaaaggaagttacatgttccaagctgtgttcttgaaagttagtattagtgggatgtagaaagtgttttggaaagatgaactggaaacagttgacaagggaggaagtctttgcaatatcaaaagatctgagagcaccagtgcattggaaatggggatccaaggatcaaaaagaggacaacttgctaccttctaatttaagccaagatttgcttcctttgtgctttgcggagggaaaggtaatgaagggtagtgctaagcagacaggctcttcatgctttctcttaaacagggcagcctttttctaacaccctcatttaataattgagatatggtggttcagaaagggaaaatgacatagttaccagagtttctaagctttgccaactatgcagtttagtttgagaagagatgactcactggtaaagaatgattagctggcatacagggcataagaagggcagcttgctcaattatactatggattccaagggaggctggggccagcttggcttggaatttgtcaggacagcttcatgggagaatgtgggtcttaccctggctgttaaaataagttatggagaggacatgagcattacttaagtaaaggtcagaagacaggaccagctctgtgcaaaattggggagtcagataagcttgaggggcagtgtggtatgtggctgtgagccttggggtcttatatacttgagctgtgtgacttcgggaaacatactttgtctcatgagcctcagtttttctaactgtaaaatggagctaataataatgcacatataaatacaaaataattatttcatggcttaaatctagctgcgtattacaaatattgtgtgattcaaccaaatctatttataccttatagagttcttatgatttctgtgtcagataatgcatgtctagcatagttcctgccacttaatcagtatggcatcttagtaactatttgcaatattattcaaggaataggaaactttggaatctggaatttaggtagagcggttaacttttaaagctggagaaggcttttactttgcgatatggggaagtagccaggttgtaagggagaggatgttgaatttcaagtgaaatgtgggaatatcaactagaagctggggtcggaggggcagagactcctggtatgtcaacatttggcttggcttgacctcaggatgcagagtttagtatcttgctgctgatggaggccttagaggagttcagacttttcgggtgagggagtagatgggctagtaggtaggatataacgtagttcagagcagaaaactctccttgggagggggtgagaggaataggaagaagatgggatgtggtgtgtgtgtgtgtgtgtgtgtgtgtgtgtgtgtgtgtgtgtgtagggagattgatttcactggatatagagcagaaacttcgggtggtggaacctcatctgcactgggctgattctttgcagttcttcctgaggaagttacaccttgatgaagggggttttctgaatgggaaataagggagagggcaggaggaagaggagaaagtgaaggggaggtgaagtttacgaggttgagagtgtgggattggtgggtataaaaagatgtgagagctatgggctgtgatccactgttgaggagactgcaagtccagcatccagagagatagcagagaagaaactggggctcccaggcggggctcctggtttcttggtgctctaggtatggtcgaaagggagccccatgcccagaactatcctgccttgtggtaaagatgcctctcaataatatttggagaatgccatgtctttcccctagtacaatacatggaagcagaattcaaagcatctctctctaagcctatgaaccacaacaagggctttaaaatagcttcagataggcacctttgccttgtttatgaagcgtgtactaattagagttgtgttttctttgtggtataagcctttgcaatggatctacattgtccttgttatcaataataactaatgagattaaaatttaaaacaggtgtctgataatccttgatgaagagaattcaggggatattgttcctgattttgctttctctccacttggaaaggaggtggacgagcccatcagaccacagcctgttgctaggaggaaattccttggctcaacatgcagaaagtgtagtacgcctagattacagtttaccagggacgagggcctgttgctttgatgcgctcccaagactggagttggaaaagtttttttggtgtagttccatcctctcatagtgaagttcttcattttcccagggatggaagctttgttataagagtcccagtgtagattctgatgtaatgattcaagatattggctttccagaggattcttaatatattgctttattcaccatagctttaattccattgtgttaaaaagaatatgccactttcttgtcatctgaagaactcttaatttcttatatcccatcaaatgtagtattatttgctcaagctttctttccaaattttgctctggagtgtttgtagacagttacatttatctctaacattgctcaccatttagtaaaagaaacaaaacaaaacaaaatgccagcaaaagtaactcctccataaaatacgtgtaaagcaggaataacatgtgaatgaacaaaatcctggcttgaatctgttcttttgcaacaaatgtaatgcggttgtaattttgagaaaagaagcctgcaaacaaaaatagttagtagtttaattttaggtttacagttttgacattgtaaccctaaattacatcgtatttggaaaaatctcttcaacttagactttttttttttttttttttttttaccctagtgctacaagatgactctatattaaagtttctctggagataaaatagcaatatttgtcaatctatataatagttaatattcaaagtaacgtaatttatctgcatcttagatttgctcttcttgttgaaaatactggtagttttaaatacgtagaatcaaaaacaaacaaatgcaaaactcctttaaacatggcagatagggagttgtgagaggctgtgccaaacttcataaggtgcagcatttaggagagatgaagggctaaagccatcagagtttctaccaaattgggtgatctacatgagcttcattagccaccccttaatgaagagccagcactgaagaaatgtttttgcagcaggagaatgaggcaactatttaatggtatctagttaaagccagaaggagaccatgagaggaatgattttaagttccctagagggcaagaagtgtttctccatgtggtacttcgaagagtaaggtaaacaaataggtacttaataaatgtcttttgatgatggagaagttaaaaggagggtacatcaataactgaaattacctggacttaacaaggctaaaagttaatagaaatctaggcatccactgtgatcaaggccaatgcatttaaataagtccacttccaatttcagctcctggggaaaagagtacatttcagatgccaaacccccaaccaaatctggttggtagcaataggctcttttggcccttggtaaaattcccagtaatccagataccaaaatacactattaaatactgaagaaaattcatttgttcattgattgggtgacatctatagtcatcagtctctcaggaggttagaagcccaacttggagttctacagcagtgcattgctgtttgccatgcaccttcagcgtctcacattactgtatgcaaagtctttttcaagcacctgataaaagctgtgttggcttagacagaatgccagtgggtggaatctgggttttattggtgctacttgagggaaaacacttagttcaggaaggcactgaaaacagaaacaaggttttgaggttgttatttggagtcagactcttgagtatatcatggaaacaaaagaattttaaacttaaaaaaaatcattttattttctatttggcttcaatatggtgataatgtctgtccctatttcctgtacaactggcctttttcttcagtatttttcctctgggaaaaagtatgccttccaaataccaccttggagctctcagctcattattcttattcccttgctaggcaaagcaaccactgccttcttaaaagttcgatgaaatctacagagtaatacaggaactcccagcaaacacggaagaaactgagcctgggatggaaagtacagctttactggcaaaggatcagggacctaaaagcttacatttttgtgctctaccactgcccatatatatttactttcttaccttcattctgacttaacccagatttacttacctatctattttatctcagtggcaggagtattttttgtaagtgttctcatgtcttttgggggaaagaaacaaagtataaaataataaatcaatattgacatggtgaagtaatatcttgaatgagataattagcaatatgagtgtttggagcaggatttttgatgagtcttccaaaataatataaatttagagtttgcttagtttgtgtctttttttttttttttttttttgagatggagtttcactcttgttgcccaggctggcatgcaatgttgcaatctcggctcaccgcaacctccacttcctgggttcaagtgattctcctgcctcagcctcccaagtagctgggattacaggcatgcgccaccacgcccagccaattttgtatttttagtagacacaaggtttctccatgttggtcaggctggtcttgaactcttgacctcaggtgatccacccaccttggcctcccaaaatgctgggattacagacgtgagccaccgcgcccagcctagtttgtatattttaaaagaatttcctagcattattgaataattagataatgtatatcttatcttttggttgctcttgcccattctggaaataatttataagaagatctaatttagattctatctgctgttaagtgtgaattagtgtgagttgcatataacatatataaaagctgtaacctgggaaaaagttattatctggaagctttagaaattaatgttattctttcttaagtatcatcaggaaattaatcaaaatggccaccttgataccaaaaataaggttttggggcataacatccttatgaattcaaatgttagtcatttcacatatcttccactttatttcattaagtccttcctagtagacactgttcaaacattattcaccatttactaatgctgttacaacattattttagaagatggatatggatagctgttctagcttttaaagttttcagtgtaaagcaccatgtgctaaacattggccaggatattctgtatgaaatggctttagttacaggcctgtctgacaacagttttcatcagaaaagtatgcttattttcctttcttttagaaaatttggctgaaagcaattttggcaaagtcagcatagccttaagtgtcacatgagaaagatggaattgaagtggctgttaggtagacctgacctgggtatggtgactgtggtgacatgagtcctttggaggacacagcgtctctccagcatctctcttctgaggttcactctcttttgtaggggcttacccccttgtcaatgctacacacacacacacacacacacacacacacacacacacacacacagagggagagagagagagagagagagagagagagagagagagagagagagagagaaagaatggagaaccttccttcttacctgtggatacagatgcaccttggcagagcccacttgcctcctgcttccggcctttctcaaaccagaccttttttagtttctacttcatccacacagagacttaatagtggccagtaaagtgacttgaaaaacgaatacatgccaccatgttaatgcacacctttccagtgggataagctcagcctgagtgccaaattgtatttctttgcacatgattatcagttaaaattatttatatagtttgttattcattaaatttattttaggaaagtacacaaagaaaaaattgtgaccaggcaattaggtagcttctaaggtagccattgccaacctatcttttgttatgaagatgaagtctgttatttcttaatattgaacattatttttgactaaatttaaattctactgtatgcaatagaattgaaaatataccagctttatcgtcattaccaagagtgatgatgatgatacctcctatttattgcccaccccccatgaacaaggtatcgtgctgagaatttacataaagcaattcagttaattctcagtacagtgctgcttgggagagattgctatttgccttttacaagatgatgaaagaagcttggagatgttgagtcatttatctgaattacaaagcaagtgagtgggcaagatagttgaaaattctttattaaatttgctttgataacaaaagtaatgtttgcttttggtaatacaattggagtattacagaggaagttatgcataccataggaagctagactggttttcagtacattatccagaagaacaaaaagtactgttaacaaatggggcatctttatctttatctgacttcttgagaataatctttgtaaattatctgatcactttttaagtagtagtttttttaaatgactttttgatgacatactttcaactttctttgcaatagaatcaaggtgcattttaaatttagaataagcgaggattttcaggaccatatatctttttacacatttgctttctgacaatttttcacccccaaatactcaaacttttacttatttattagttaacttttaataatcgtttcttcttaacatagtcttagtatatgcagatgtttaaggttttcattttcactgcttttcatttaataccattaaatgtataccagaggttacatttttcaagtttattgttctgagtatttatgcctgctctttttcttcggttccaatatgctggacagtctatgagaaactgatgtgaaagttgatgtctttggagattacgtaaaagctgctttagccattatttttccatttcttgctctgctaagcacccaattgttgagcttgacagaagatcattttactgagctatttactttgaaaaattataagtaatatacttacagaaaataattaaatactatatacaggtaaaagtgaaaagtaaatctcttccttctccttgtttctcctttggccgttgctcccaagcctaaatttcttgtttccacattttcttaatgggcatggaagcataggtatgcatgtgtatacacgtactttatgaagtcagatctctttaaattccaattgtataggatggctctctgcactgtgtgtgcctccttcctgtgtgtactggactgtgggataaacagctctcagcaggatattcatattcagtaaaataaatgatgaatttccaatggaaaagagagtcaggaccaagaaaatagaaacagagactgaaaatatgggaaacagtacaaatttatagaccatgaagttcaaaaatgttggctgctaaattagcatcatgtgtttaaaaagtttcctggtagttatgtaaaaagcatgatacaatccataatatgattttgttttactctgaaggaaggaagtatggcagtttcttagaggaaagcgtgacttttctgttaggctgctgggagctgtgctgctgagatagtgtgggtgaaaatgggatgtggtaatgtgtgcttgctgaggagctgagatgtatccagttccataatttgccttcaggaccagctccctaatgtgtgggcctcttgttcaaaaattaagagtttcaagatggtgacagaagagcatgaagccaagcatggggaccacgtaagtggggctctatgtgactgcatgggtccatgctcctgacactggccctgtgtgctttgagatccttgagcatgctcaggacctgtgaggagaagagcaggctggtggggaaggggaagttggtgcctcattcagggatgtgctcagagaagtgcaggttctctctttgggctttccttatctctgtcgcttcttcaggaaggggaattaatggggggctaggatgtggcctatttggggagcagagtggggagtaataaagaagggttgaggagggctctgctagaaatattggaaacgagacctgatgcatagcccgaaggtggcatcgattcttaagtaaaatgatgtgaggtgaaatgaggggactcttccccccttaaatttggagcagtgggagttgggggtatgtttacaaaccacttctggaatgttgagaacagaggcaaggaagcatgtgataacagttccttacagttttaggacacagggaacacattttcctaagagcacagatgagggacataaaactcagcccagcagcttggggtatcaggaaaggcccagaaagagatcctgagcaatgcatctgggtggagacctgggtgtccacatactgttattcatttagcactttggactttatgctaagggctatggggaaaccactgaaggcttctggagagaagctacatcagactttcattttctgaagtatttcggtttcccatgttactgtgtagcagtggttcccaaagtttggtcccacgaccagcagcactggtctgacctgtgagcttctgggaaatgcagattcatgggccctatctggacctattaaatcagatctctgaggatgggccagaaactctgttaggacaagctctctgggtgattcttgtgcatgttaaagcttaagaaccactgctgtggagaatggatggtggacctgacttaggaagtgtttattacagatcccttatgtgactaacaaggaacctgggggcccgcgttaactttccaaagatcaacctgctggtggataggtaactttccaaagataagtaactttccaaagatcaacctactggtggatggtaatcaagaaataccagttacctgactgtgcccagtctttctgccatggaaacttcccaggcagtgagaagattatcatagcattttaaaaagaaaggtgtaattatatgctatattacctttcagaaacagcgcttacaaaaatacgaatggaaataggcaaataatgtagtgcataaacatgattgatgtataatttttgattttatcacattttatatgtgatgcatattgtgtttgtgtgtctctgagactggaatggggaagcaggaagtagctgttatcttaacttaagctaattattctctaagcagtgaatttactagggctatgaccttgggtaaaacatttaatctctgtgagcctcaatttccttatctatgaaatggggatagtaatatctacctaacacagttgttagcgtaaggtggcttatgtgaaagtgttttgtaagttgtaaagcatttaaagcattataagtgtgagcagtatttttttatcatataacttaaatccaatcatctagcaaacatttattaattatattatgtgaaatattgtaagtgtagagttttaaacatgttttttttttttcccagaggaattataaccttttgagatgattacctaaattattcacactattactcagtggtgaacccattcaaacaatatggacaattttattagaaattcccaaatctatattttggattgaatttaacctagttgttagttgttttctaaccttgttttaatttttatttttagtagggatacttaagcacattgtgacatggtgtactgtactttagtatgtttaatgttgcccttaaggagatcattcagtttaataattaaatgagtatataatcatttgtataaccttccaggaaagcaacaaaagtgcatgagcaatttctaagtaaaattaagtcagtgagtggtttatgtgactcatcaaccttaatgtgaattggagtagttttgctttcatcaattggaaataagtattctaattatttgtatgagtcttttggttgcccagttaagcagttagatgttccttacagccgtaggctaggctttctcagggatttattaatttatgcctctttcatgttagaatggttcatttttaaggaaagtccagttacctttagagatgacacttattttatgataaatggcaacgtatttgcattaacactaaggccatattccatttcatatgggctaaattgcagctaccaataaaacccagtggtacattattttgatgtgggtattctggtcagtggagagatcattctttaaacgctttaatcttttaaatgtctattctttctagaggctgaagagctttctaaagtgtatacctcctttattgaaagtacaatattcatgtcacaactcaaatcacttttaataacaatatgctatactgttcaactctgatttccttttggagtctacgagagggctgacgtggaggggcccaccagctggggaagcacagctcagacggccccgcagggtggatggcacagaatctgatataaacgggtaaacttctggccattgccctggtcaccaactcctttgacttgttttgtccctggctctggattctgtcttctggattcaaattgcagtttgtccagttccgtgccttgagtaactatactagtatttttttaaggtagacaatgggagtggtcaaagcttttatctattctcattatttttcagcacagtgtcattttaaagtgagtagaattatttttttaactttgtttcttaaccagtgtagacccaatttatgtattccctatatcctgtttctgtgcatttccttgctgtttcttactatcgatctaggataaaatgtatttcttttaagaaacttcccaggtccattcatatctgaatccaggatgttttttgagtgcagtttttaaaattgaattctaattccagattttaaaaatagcccaggtaatattactgttaatcacacagaaaaactatttttgaatacaatattgtagaggattaagctaagagcactgttgttttgaaatgaaaaattttaattttaccgcaagtttttccaggttgcagtgatacttaacattgtacaaatacatgtatgtaattaatactttaaatttttagggaatgattgttgagtatctggctttcagtccaaacagagacaaaaatgatcatgtatacagagaagcagaaattcagtacggtttcaacctattaattagactttcctttactttcctataatcaaaggtgagtaacttcccagaaaatccacagtgtacaagagatgcggctattttgatacatattagcactgacacaaatgaaatttgaaatgggaagtttttttaggactcagtgatgaatgtttacatttgaaagttaaaaattttctttctgtttttttccagtaaaaattcaaaacaaattaaaacagtgaatgatgttttctattgtacttatagtaatcatctcttctgcttgaagttttattatttggccatataaagtgacagatcattgtaaccaatttgtggttttaaccatcagaagtaattgactaacgatgctatttatatttggttagggattaatggaggggtgtgggtgtgtgtttgtgtgagtgtgcacatgtgtgtatgtatacttacattttagcgtattttcttcgtaagtgaagtgccaaaaacaatttgtaaagcaattctgttttttttggtgttctcaaactcaagggttttaatcactttttaagttcatttttcgttatttttaaagttttgaattattttttgcaaaaatcttaaagtaaaaaagaacttttatctctagagtggaacagatgaaaagggtagagatcttaaccacaaaaaatgttttaaataccctctacatttactactttacacgtacaacttggatgcctctctatatatttagtttcattcaagttttccagttttcattctaaaaaggaagcaaaatacagaatcctttttccaaaggaaaatgtttgtagtgtcatgaaaaatgagaacagatggcattgtaaagctttggggagatgtgtagcgcttcaattcaaattgttaggcaaagtcggagacaaatacatagctaccaattgttgtagttatttatatgacttaattcaagtatgtaaaacaaaaacgtagaaaggatagaattttgcttcttgtattaaataaaaagcatttttgtaatttatgatccagccctcaccaagtgaatgcctaagcaaccaggttttttttaggaaaaaaaaaaataatcaggaaaagcagttctagtcatttaaaatgtatcctgtacttttgggtttcacagtgggcaagtttacccagaggcagtgtgacagcctattagcaaaataaatagatcttccaaacttgtagtcctctgctcttttccctccacttttaagtaaattagcttttcagtgcgtctgggcttgggttgtggtaggatgcattaacttctccccacactgttctgattgcgcagcaaagcgtccattaccaataccatatccaaagtgacgtttccatacaggctgcctgctgtttcattcataaccacaaaacaaactgaaatgactttacttctttttacaacttgcaaagagttaatggactgtgctggccccctgccaaaacctttaagaaactttattaatgtgttatgaggctgggacaccatagtgtgggattttattggttattcatcttaatgaataaaaatatgtatgcacaattaaagccacattctctagcaattgccttctaataaatgttgagtctttgtcagtgcccgtcattgcatttgcttatcgattgtgatccttttccttccaaatcctaaagttaccagtagtgcaattacgtgaactttaaagaaataccagcttagtattggaaacgagcaattattcagtgatgaaaagaacataagcatgtcataaaaatgaattaaaaatatctccatgtcagaaacagtagttataatctgcagcatttttcccactatatatgaaaaaggctgggctgtgatgtattgatgattcataagacagaggcaacataattttgctgtagatcatgtaagaaagtgatagtggaaaaaaataacttgtttactctgacatgctacttatcagaaaacatttcatttttgtgtacatttttgttgttctttcatctctgactgtttcttcttttcccttatgggtggggtgttgcaaggaagagatgagggcagaaataatatcatattggaaactaaacttaaaaaaaagactgagtgaatcagtgggtctagatgaatttaatactggagttgtttgagaaaagatgaatatttttgcatttttttgaatatatgctttgtcctctgaatagaatactgtatatcttcaaaacattgttgaatggtcctcagtttatgagaataatcccaagtacctaaaatgagggaaacttccaggatgttttttggcaaaatgattttcatattatggtcattggaataggataattttataccactctatcaaaagtacttgtgaagagtccttaaggaaaaaaaaaaaaaagctcttttaagtaaaaataccaggaaaatgaacacattacaacttcaaagtagtaaaataaaaacttaagtcacgtctgtttttatgaatttagtcgtaattcatactcacatttgagacataaagtaatttcttgttttgccacaagtagacgtgagaataattcagttcttcttgaattagcaaatttggaatgaggtgtaatttttttcttttttagtacaatttaaccttgatgtcggaaggattgccaattgaaagaaaaaaaatctaaactgccactacactgaacacgtatcgatttactctcttagtcttttttttaacaccacgtattgctttgttgtatagatgaattagaacctgtctggagtttaaaaaaatggcctaccctgaggtcattaaaatcagattacaaatatggaataaaagtggaaagatgattctaaaatgacttttggggtataaaactatttagggagtgggaagtgacctttgaatttagattttgaacattgtgtgcagcttgtcatcttttcaagtcatcatgctgaggcatttggccttgtgaatctgatggtgctgtgctctgtatgggaacccaccacctaaattcaaccaaggaaatgtttgaccttgggctctttccttgagtctcatttagccctgtgtgagaaagtggtgaacattgtgttggtggatctgtctttcaggtggcaatggaaacgggctcttctctgtggtcatgttgtctctgtagataaaccatcagaccttgaactctggttaagtacagccaagaccgtagtaacattcatgtgaaaaatgacacgtgggagaaattagactctcatttacgagatgtggcttagagggggattacttgatcctgtggtgaagcttcaggactttggtgggagatgaagaggtttgtggggaaggaggaaggtagtggctttgaaaatggtgtctggtgtcacatgcagtccctgcacggagctgctcatgccgagctggccctttgcctgtcagcagcatgcactgacttagtcctcaatttgtggcatgctatgggcaaaaggggttttctggtctcatcctcctcccagtttgtacacattaccaaaccacaacataaactccccacagtcagtggcctccactcaagggaggcttttgccaggaaaattgggaaggtatgtgtcaaaaattagaaaaaattgactaaggagccctgtaattgcagaggtgcaacctctacctggactgtatctctttttctgtccagtggtgacacctctaatttgggaagacagtaatttagtttggattctggggtcagtttggcttgggtttaattcctggctttttcagttattagttggatagccttaggcaagttttctcatctgaaaatgggaataataatagcatcccttagtgttatcgcaaggacgaaatctatggataccgtaatattgagaacagtattggacatgtaaacaaatactcaatgactgttagccttactattattttattactgttcacctagaagatatttgctgctaagaggaggataagctaacattgtaagcacatacaatgtatggaatagtggggttttacacagctaatcaccatttagcctcactggaatcctttcatttgtaggtgacaattttatatgcgttgcactgtcttgtgcagtcagtaagacatagagcatgatctccaaaaacttgtattctagttggggatataaaatatagctacttggcaatatataccaaacatgactgaaactaagacacaggcaaaatctgaaaccatcccttaggttttttttttttttttttttttttttgtaaagcatgttgtctgaatctcataactctgtatatgatagcatagggtctctttgcaggtactagatggtcaatcaacatttatcgaattcttctgtttgttgagcagattgttgttttagtatttggaaactctcaaggaagaaaaggtaataagtcagcagtgtcagaccataaaatctcatgaaaggaaagaaattagctcaagttttaagagtgttagtaagggccaggtgcttggctcacacctgtaatcccagcagtttgcgaggccgaggcaggaagattgcttgagctcaggagtttgagaccagcctgggcagcatggtgaaaccctgtctctaccaaaaatacaaaaaaattagccaggtgcatctgtggtcctagatactcaagaggccgaggtgggaggattgtttgaaccttgggaggcggaggttgcgagtgagccgagatcataccactgcacctgagtggcagagtgagattccatctcaaagaagaaaaaaaaaaaaaagagagagagagttagtaagttactagtgaactagaaatattttttgaacacaaccactctgtttcacctgtctgttaagagtggcccattattaaatagctgtgtgactgattattttgataactaattaaacaaaggataaaagtccctaaatgtcttttacgcagaaacataattaataatgctgagaaattattctgctgtaaaaaggtccaggaaaagtgtgtgtgtgtgtgtgtgtgtgtgtttttcaggtgactactggagaatagacattattcaaaatatacgattaaagagacattagattttcttctcctaaaatggagacttaaaaaaattaagtaaacaatattggtgtggctctgctgagtgtgtggacatataattcaagctagaatgggcattcagtgaataagcactatgatgaataccaccagtttgtgtcagcattatggaattcatctttcacctctgaattatctttcagcagaggcaagaatgttggattcagttgaagcttagattaccaaacagtaatcactgccaatgatgattacaggagtacaccaggcctaatgtgtctctcaacctgagcttaaacttgcggaacagtctcaaagaaaaatccactgacctcattatgcagtatttggctgctgtgaacatagcctgttagctgggatttaagtttaacagagaaaaaaaggacagagacaatatataccttgtgtatatatcgtacttatgaaggtgtacttatgaagtatttttaattcttcaagtgttttttatattcctactatgaacaaatcagtatgtatttttagttccatgcagtgtctccatcatttcctccctcccacgttttcattccccttcctttcttctttccctccctcccaccctgctttccctcccccttccttcctcccttcttttttccccctcccctcccctcccttccttccaatttttgttcctttggtcagcccttggaactcactcacagagactatgtatctgatctcggtttttttcagttttatgccacagacatagttaattcctcagatgttttttgaagggaaatttgtattatttttatgtacagaaaactcaacagtgtacatttaacccagtttggtggcaagttctttagcttttgccttttgagcttggcaatgtaagccacaggcttgggacccaggacattgcctccccagtgatgacggatctcattggctctgtcgttgtaattggttctgatagctaccaccagcttaaccaaagcccctttgtcttctgagttaacctgtatgaaggcagcagtggtgcaggtcttcctgtggattagatgtcccagtcttgtcttccccttgatattgcagtaagggacccccattttacgacacagggcaggcaggaacacaaccagctcgatgggatccatgttgtatgcaatcaccaccaactgagctttcttattctacaccaaggtggtgatggtgttaactcctgcttgaaggacaggtgttcttagtggggaggtcccctttgccggcgctttcttctccgcccgggccaacagcctctgcttcttctcttgctttgtctctggtctgtacttgtggggcagcttaagcagctgagtagctgtttggtggtccaggtcctgggtgaactggttaatcgcaggaggcattttcagtcgcttatagaggatgactctctgccgctgcaacctgctatagcggggccatttcacaaagcgggcgaggtctcttttgggctggatgtcctgtctaatgccaaaattcttaggccttttctcaaacagggggttgaccactttcttggcctcctgcttcttcaagacagcaggggccggagccaccttcttccccttggccttctttcctttccacatcttgggcagtggacggcgggaaaagagagatcattcctcaaattttgaggcctgtgccatagaaaggtatgaaaaggttttcttttgttaatgttattttaatgttgtaagacaaacatagcctgttaaaggatgagaagaaaacaaattaattttttggttttcatttttcatacacgtatgctttgatagagattataagtttatgtcaaaatcatgccattgcaaatgggaaagtgttggctttgcttatgcttctctgtagtatgttttaatatggtcagaatttgttgaggttttttttaacatttttttttccccacaaattaaatgagtttctttaatcagcagaaaatattgcgggcattatgtgtgattgaaatgttgaggtcagcagaatttcgtaaaagaccccttgtcaccattttctatctggtagtattccaatattcctttgtagttagtttttcaagcagctttaactactgcaacacaaaagttgtggtaccaagtcttatttatgagggaaatacacattttgacttcctgtgagacagactttagaccctgccttggtagcagggttggcctttgcccttggtgaggcgggcccaggccggcgacatttcaggaggccgcttggcagccattttagatcctgcccgcgcggagagctcctggctgccaaaaactgcagtcgctccgtgccaagacactcttggcagtggagataaactttgtagagatacacagtccagaaatatcttataattacaaagcacagggggcagaatgtttttacaatacagctgtgctaatgtaaacatttaatttggcagccttctccacccacttttcaattaaccgggtttatgcagatactttaggtctgtaataaactttattgctaagagtacagtttatgaaacacagatttgaggggcttttttgaggggttttccatccatttaggaaagcacattgtgaatgttatgttgccgtgaatggaaagggtagctttctgtctcaaaagatgccatgggcctggcttaactgaaacaattgctttaggaaaaaaaaaatgtgggggctgtctcctttggcttctaaagcatgcaagaggatattaatagaaggaggtaaaaatcacttatatagctacaaaaagacactcgtgttgatgatcattcaaaaagataaatgtcccctgcaaggcatgagactgtttcagagataaattcccagtaacagttcttacagatgtaattgtaataattgtgtgatcgccatgataattattcttatggagtgaaagaaataattttctatgtaagtagcattcaactgttcagctcacaaagctagtcaatagatcgttttcagctaacctaaaaaatggtagagttcatggagttgtaaagctaaatttggtattaattgacattgtgaaggtgatttttttcataagaaatatgacatcacaatccatgatatctctttgcatagatttgcttacccatttctcagatacgttagagaaaaccatataaaatactacacatatgggtcgtttttctaaaagacaagaaacgtagaaccgatatttttatgtcattccatttagaaactttgctttggtgatgatttttttaaattagcttttgttttttcttgaggatgggtttgagtagcagaaaaccaattcttaacgatgttttctctcagtactccttttgagactttcatgtagtgtggctccatcaatattctataatgggatgtgaccacaaagtaattttcatcctaaaatagtatttgactcttcagctcccgaactagtcagtagacccctttcatctattctgaaagataatggaagtcggagaattttaaaactgtggtctcattattttatagtctcattatttcatgctgcaatagctgttgtgccatcataccacctttacacattctgcttatcacagctaaacaatgcttttgcagtctgtggcttttagtctctcatgttttagttgctataaacaaaaattaaatgaaaaagtttgtcccactgctaaatctttgtgtgtgtgtgtgtgtgtgtgtgtgtgtgtgtgtgaaaagtatcaattttatcttcaaaatataatgattacagattctgcttatttgtaaattgtatagagagcacattttacctgctagcaagtgaatgaaagtcaacattgtgcaaatgaaaccataagctccatgaagacaagaacaaatcatcttttattgactgttgtagactgagttccaaggatgatacatggaccactgtaggtgttcagtccttttcaaaaaaataaacgaatggataaatatcatctgtatatgtcacaatcagaatattgaatgttaattacctgtataaattgatagctcattatgactttttttttttaaggttactttgtctttcttttgggaattaatgctctttgtctcagtttcttcatggatagtacatccaagataaatttgtatgccatttaaatagattcccaaaattattcagggtaagttgggatacaggaggtcacaatcttggagagaagtaatgtataaacaaccaactataatgcactggtcgggccctgcactaaagtgtgagcaagaccatgtgggccccagagggtggtctcattagatggggcaataaggttcaggaaggttgtaacagacgaaattcaagagcttttaaagatgaattaggcgtttgtcttgcatcaaataagggatattccaggcatagaaaccttatgagcaagggcacagacctgcagttgcacggcatattctaggactgttaagaagaatattaggaagttgggtgtgggtgtgagggggagggtaaagggtgatggtttctgtgagagtgaggctaggctggggccaggttatggagcaccttgaatgctgtactaaggaggttgtagattatcctagctagcaattggaagccaccaaggtgttttaaggagtgaagtgttgtgattcctggtggctatgcagaggatggagtctggttatagtgtgaagagtgaatcataatggcctgaggaggctgaggctattgtgaggtaaaaatgtgaagctcaataagggacttagcaccagttgggatggagatggggaaataggcttgaaaggaagatagagtctgggctgacaactgaatgtgaagctttggggagttggggtttctggaatgagcattttcagcttgggaaactgaatggctgtgaatgccattaattgagatatggattggttgcggggaggcaagagtgtacaaaggttgtgcactagcaacatcaggaggagttttgcagttaaagaagaggttagggctagatatggagatacagagttctcaaaaaacgggtagtatttgtaaacatggacctagctgagtttgctgagggggaatgtacaaagacaagaagatggccaagttggatggatcgtctttgggatcaccaacatataagggaccaacagaagagaaggagatagccatcaagacaggaaagcagccctcagaaatagaggattggacctaagaaaggagtggtgccctaaaggaaaagggaaggagaatttccaaaagctagggatacttagtgtgaaaagtcaactaagtagagtctgggaaagtcaagtcgtgttttaaaaaaaatagtaattttggagctgaaacacatacttagacttaccgatcctgagagctagtgttgggcatgaggattattattttcttatctcacatcgtgatcagagagtatgtgagttttggtattgtgttttattccttggtctaacttcactgaaacagattctggggtcctgggttgcttaaaggatgaatattctgtagactttaagaaacttctgatgaaaacagtggattatgtttattgtaatctttctcttctaccagttctgagaggaaatttgcattttcttcatcaaatttcaccattgactactatattttaaggaggagaagctaatttgaaattttgctttgagttttgaagaaggcatgaacagtttcacagaaaatagaaggaaatatgcccaactactgagcacacccctttaaattgctcttaccaggccttcagacctaggggcaaaattatgctccaggctccaggtccctggattcactctgttagcagcagcagtaaggaacagtttatttggacaatcccttctgctcctgttctccctgcgtgattccctattttagctgtaaaagactcagaaagtggtgattttatgctagtacatacagaaataccttagcaaatatgattgagccaactaatgtgtaagtaaaaacaatagctgagtggaaactgggtgcaactctgcagtctccttggatatcttcaggagttttgtgaaattaaaaaaaaaatggatcctggatcctccaatgaactgaagtcataatcagtctgcaatgttgacttgagaatttcttttaaataaaaataaatgaccaagtggaagtcttattagctaaaaccaaaagcacaaacatacatggccctttcacaaagtaaaacggctataagcataatgagactccaacacatctttactttttttgctgttttgtttttaatttttccagctcttaacattctaagatgctgccttaccacttccttaaggaaacacaaatgggtgagttaagtttttgaaagtaaaggaggatcctgtttaagtagattagggtctggcaggccatttaactttatcaggcatctaaagccgaggatgtacactgtagccggctgtgagttgccaattagctgggctttccccactgtttctggtttggcagggatgaggtggttcaccctgccgcactactgcctgccaaggacacatggccagctcccggcttcctgtcttcctctttgtgtcctggccttgccttccagggagctgccagaacacaattgccaaaaaatcttccttcagaaaggtcaagtaacctcaagtcacctatgccaatatttgtgttttctttttaatccttctgtgttcgacttggaaaaagctgtagaagcgaacttgcagaatggaacctgggtcactttggatcacttggataaagcaacagaacccaaagaatcccttggccagtcagggtgtgatgttttgagtagaattctatttaaagctctgtgaagtgtgatagagttcagaatggttcagtgtggatttggatttagttgctttttaggattcactgtacacatgtgatttttggccaaagctggtgcatcacatggcagggagagggagaaaagtggagattggttttggcttaaggactgcatttttgtttgtttgtgttttcaggactctatagtcacatactgccttttgctttccagtttggtgtctgtgagcaagcatcagcagccaagtcccttgtacactggctgagaacaatgtgcgggagttacctggggtgcttgttgagagcgctttcttggccccagcattgctgtacgagtcccagtcattgcgggtgaggtcgaggaatctgaatttctaacaagcatctcaggtgaatctgatgctcactagaatttgtggactgaatgtcactgattgtgaaatgacaataaggcaagtagcatttattgtcatgatacggcaagctgttctacttctcctttaattggtctttttggagctctgtgtttaattggaatctagattatatgcagatctccactgacaacaaacacttttctgaaaattgaacttttaaaaacctgttaacataagaaactttatccaagtaattgttccaggtttaaactctaaattttaggatgatttataaggcttttttaatgacacgtagaatgccatagtgaacatccgaaacgactttagaaggctccctccccgtagcccacactgtgaatcatgctccttggagacgtgcagtgtgatgggcctagtgatttctgttatggaagggaaaccccatttctctaatacttcataaagcaaagcttttattatttactttgaaaaaattccatttgaggaatatggaattcttaaagtgcctaaacctgagccacctactaattcttatggctgttggtaatgaatatagggggcaacgtgtattctgtctgtagactccaggaaagttcaacgtagccccaacattcccttttggcttttcatgtaaaattgtccatagcactttcttcctaagctcagtttaattttcttttgtgccttttgtacctcgagatatgctgtctttcttggtgagaatggtctagccgtgaaccttttcgtcattgttttgtagcattcgtagagtgaggaccagattaactgtgtaatttaccttttttttccccaagttatttccaaaatttgctaaagcgctgcagcctcagggacacctctgactttctgacacagctaagaaacaccacactaatttggaacacatgttctgtcaaagtttacctatagccttgagttccaaatttgcaacttcagcatcttctgttgaaaataaacagcatattttttcttaagctccctttttgcctccccttgaactccacagtcttttataaatagtaataaggaaatgtggttatgggtataattgccacaaggcaattgtaccctagaggactgatagaattttcttttctatatcggagggctgggctccatcaagaagatccatttgcaaataactcaattggaagaataacaacagtgtctttatttttatagcaactttccctatagagatcacagtacagtgtgttagggacatcctatcagattcattgttctaataccccagtggactggaataaagttttattatagcttgtttgagacaggagagtgagactgagaaaggttaagggtcgtccctcagatcctaagaaagtcagaaggggaaatgcaatgaaaaatcaaggtttttctattactctgcaagttgtcaagctctgcattcctttctggtaattgtaaagggtcagaataaagcacaacctatttcgggattgcaaagtaatgtagatgaaaatgcctcgaaaatagctaaggtattcttgctatctttatcatatttagtacaaatggaaggtaagaaagagccttattgtcagtatctaattgtaccaatgtatatgaaatggattttgcacattcttgattgattggattcaaactgccaagttgtcttaatcattaataaaagacaaatggaaaataacatttataattctggatttaaaggaattccatacgatttgacaacaaattttgaacagattaagaagccaaagatcaaagttactctgattacataaacggcctaagaaaacacttaattaagtagtctgatttttctttttaaggttttacttgtagactccatagttctgagggtaggagtgatgaacttaggctctgtttttttttttttttttaagttagaataagagaattgggagtaaaattactactaatctttcaacctgatttcaaggagccttggaggacacattctgtggggagtagacacaattaacttgatgctcctaattactgttgtttgatttgtgattaaaggtggtatattttggtgtagcgcttttggcttctcaggtgtccagtgtgctgctgctggggagagtagggggtggcagcattccctcccttaaacaggaacccccttccgcaaactagaagctgagatatcagaaataacccacatttagtcagaccttgccttctaatgagaaaaagtgaaaaattaggcaaaacataaacacacggctttttaaagctctctttgattttcaaagttctagagtgggttcatattttttcactttaacccaagcgagtgaagctatctttcacttatagatcctccctgagtgcctcatgggaggagtaatggccttgagacttttatctcatcatcactgcacctcttgttatgtcttgatgcttaatgaatgttaagctgaaaactaatccaggtaaacaggtgaacggaaaattaagttcaaccagcgtgaacatagaaaaaaaaaatccttcatttaggagcaccattagcactgccaatggactaaggagacacatgctgttccctaccaggtgattggatcatatcagctaatttattctatttttaataattgctggatgatattaatagggaactttcagttattattttattattatgcattttcttttgcaaaaaaaaaagtttaaaaaacattttcttaaataccccaccccctttttcctcccaatgcccttactagattcctttgtctatgtttgcaatgtcattgtgtttttcatggtgtgacatacatacccttaatgccataaaagattcctgctctgtgaaaagaaagttgaacagtgttgtcactttgaaaacacagtgatagctttgaatgggagtctaatgtgaggaggaagctttggctttgggatccagattgctgtagccaaacttccaaattcagatttggtctgcaatcctggcttcactgcagtcatttatatcgacagtgaataaagaaacctaaataaacaagaatgaagtggcaacacaataaaagtcgtctcatatgtgctttatactttcaaataaaaattagaatttatcattttctttgagattatttctctgtttcgtgtgctcacaaaattagcttgatgttttaacccatctttatttcattaaagtattccttagatatggagttttctaaaaaatacaatattttgtcaataagatggaaaatgacaagcattatttcctaaaagcaccacaggagagagaagcattgtgcatttattaggtagtgacagagctttgcagatggatgaaggaagctgtaacatcaaaccttgccatctctggcggtttaaattctctgtaggtcagttctaccaaaagttttttgttttttgtttttttttaacttcttttgccagttgattggtcctatgaagtaaattaatggtttcagttcaattcttgggcacataaccaccccagttagcattctctggggaccttattggcttaagcaagcctagaagaataggatttccttccagggtcaggtatagaacattgtggagaagcttacgggatctctttctcttttgtgaaagagagagagagagagaatgtgtgctggattgaggtggtagagtgcacctccaatattaaaaaataatttcctaatacgttatctcagtgttattttgttctatcttctgtgaaattggtaagtggatattttgtgtaaattggctccaaacagaccttcaaatacattgaaggtggagcttagttctttgctgtcatcccatttctaagatagtgcctgtttcaacctatttctcagccaaattatatcataatttgctatctgcttagtataatgtatctcatttgttttatcttggctttaattgaattatctattcctatggcataattcttaaatcatagcatatacatatacagtacattggaagaactgggataatttttatttcttcttattgtcttttttcttttttgactgtaacttagaatgaaagtttaagtttcaaatagtatgtgtgtaataaaaaatttggttaaaagttggattcgttttcctatctggctttaggctccctgtcccacccattctacctgccattacgagaaaaagtcaagggctatttctgtcttgtggtctcagcattattcctatggtttttagtgtctgtgcaatatgtctgctgtcatatttatggagattgtctcttagcttacctgtcacactataagtttctcattggggaaagtaaagggtggtgggaaaacataaaaagtgaaagttattgctagacttacttcatggccactttatgtctatttagactccaacccattttcttttttcagtaaatatttattgaattaaattcataaatgtgcattagaagtttgccttatgtggcatagattgactaaaatacatttcaggcacaggcttaaaaaataataaacatgtattttcagttgaaatgatctctgtatgatgtttggtggtgactgtcaccaactaggaaaataatgttttaaaaagagacataaaataaatcttgggggtgggggttcaaaatgattgagagagaggatgtagagggacattgcatagggtgcaatgctggcagctaagtgtgcacatccatcaccagtgtcatcctgttagttctatccaaaaaaagttggcaacatgtgaattgatgctgtatgtttttccgttatgtcacttgcctctagccgggctgttatctagcacagtttaaaacattaagtatattggtactgtttgcatatgtgattctaaagttttggtactgtgagttcatatatatccctgtgcgtatgaacataaatatttttgttttctcctgttcgtagagtgttttagcaaaacactatagagtgttactattctgatgggaaaaatacttttgtcttattttgtaatttttcttatgtaaaatgcctcatgtccagtggggacttatgaaccatttcctaaaggaaacagagtaatgttgaagtcatttctctttcctgttagggattattcttacgttgatgtatagtggtgcatatttaagaaaaccttttgattatccccatgagactgttagttattccgacaattgataagcatttcgaagttgtttgtggcatgaaatataagtaaatgtatcatattttacaaaaataatcaaacttataattgttccagtcaaggagcatacagtcatgtgtgaaggaaaaacacatgcacaagaaaaaacttgttaaaaattggttagagagactaggagatgataaaaagaagaagtaaacttggatggatgggtaggattatcagaagacctcctggaagagatatatttagaacatggcattgagcatctagttgccttttttaaaaacttgattatttttatgtatcagtatgcattacaaaaaactttgggatacagaattttgtacttagtactgaatggtggcagtgctttctcatcttttttttaaaagatgagaatcataacaaacacgtgaaatctattggtttttaaaaaagttattatatttgtctaatactgcttaattctattacctgacacgtattttagagtgacagatatgccaaattcaaaaaaacaaatgtatctgtcagatttgagtaaaataaactaccagatagtccaataggaggaatttcatgggcaaggccagttacagtaatgttagaatagatgaaaagctgaatgggcagtgaggtcacccagtcattagcatcagtaggaatctactacacaaattgagctggagctgcctgaagggagggcatcacagagggaggaacttgttcagtggaagcaagaatcacaagaggaaaactcaccactgtttggagacaaatgtcaaagcagaggagggaaggaatacctctccttctcctttcttcccaccctccaaattcccaaactcctaccattgcctcctgttggttggacctagcctgaagtcaatagttaatggagctgggaaaggtggtttgcagaaacagagttcaggatggatctgaggacaagttaccgttacagggcaattctaattttgggggtgggtggagggatgagatttaggtaagattcaaagcaattgtttggggcaggggaattaagtttgcataatatcatccaaagctttatcacaccagtttttcttactggtgttgagttactaattttttaaatcctatctgaaaatttagtttatacatttctgtcatggccttgctgttagatggttttgcaaaatatccatgaacaatcttgttagttaattttagaattttaacatgctttaaatgtcaagaagaatttgatcttgtctgattagaagcaatctttaagaccaaaaacaacaggtgacaggctcaaattattcctatggcaattaactctgacaaagaattggatgatccctccttccccttttccatcttttggaggtaccaagagtggacaaggaaaagttcaactggtcttgtaaccaagcactatctagaacttggaaataatgatgtgatttcttgtttttgtgtatgtgtttgttggaggttgagtatgcagcatagtttgttttttgattggattggaaggcaatgtcagttttgaaatggcagcataataatcaatttggaaaattaaacattagccatatgtaatggtacgtgcaatgaaaataatctttatgagcatgggagatgagtctgcagtaaaaagcttgaagttggtctgtgttaaaattttgtcacatctggaaggcattgatgtctaagattacataggtttgatatcattcagggttaaggcatatggatgggacattatgcagaaccttgattttttcatactctttggatttggcttaggcatttttgaatcataaggaattgatttgaatctctattaaagataaaatgagtaacaagacaaaatgggaggaattttgagcacctggtacatagctctgcaccagtatactctcagttcccttttttaaaatggatatagcaagtgaacatgcccgtcatcatttattttcccatttcccaaataaccatagtgatgagtagtagatttcatggtgggcttctgttattctttattattcttggttagaattatctgtattttttttatttttgtttatttttttcaagataggggctcactctgtcaccgaggctggagtgcagtgatgtaatctcagctcactgcagcctcaacctccagggctcagatgatcctcccaccttagcctctcgagtagttgggactataggcacccaccgctatgcccagctaattattgtatttttagtagaggtggagtttcaccatgttggccaggctggtctcgaactcctgacctcaggtgatcctcccacttcagcctcccaagtagctgggactacaggcacccaccactacgcccagctaattattgtatttttagtagagatggaatttcattatgttggccaggctggtcttgaactcctgacctcaggttatccacccacctcagcctcccatagtgttgggattaaaggcatatgccaccgtgcctggccaggattatctgtattttaaactgttctctttaagtgactgtttgaaagaatattgccccataaaatgccccatcttcatgtctctgtgagcttgtaaacttttcaaagttctttcaaacccattatttcacttattagaatattcttgaccttctctttttacaaaaaggaaaatcatgtcagctatttttttgtttttattttatcagtataattgagttcctttctttgcctgcacagttttaatttgcaagaggaaattactgtctcctcatttgtttcctcattttatcccttttcaaaaatgttggttcaatgatgcattattcaagtagttttattcctggtatattaacttttgccttgaaaacatggggacagaagttctttgaaccacttatcaaggaactgttaggacatttaatactattatctgccacatcagcaagcttcctgttcatcagatgacttatctgatttttttcctctaatattttgataaagttattttatgaacagaagcagtaatgaataccccacgtacaaatctactttacctttgtagaaagtaggctatgcatcatcttactctgttatccagttaattgctatgcatcttgagtttaaatgtatacatttatttttatatgaatatagtatcacagacttaagagccataatttaataataaaacaaggactggttattaatcacatgtaagtaacataagatataaaaaacccatccagtttcttctctctaagctcacataaggatataaacataaacattttaatgatttggcaaagtatctttttagctaacatgatagagaaatctgtatccaatttaaaaaattttttaggaacatatgcctatgaaaaaatgagcaatgaaaaaataagaatatgactttttggtcattgagtcaatcactacatttgtatttgtagagaggttgtagaaacttaaaaattagaatatgtgtagataataatcaaaaactgaaagttatgattggtattactggcagtttgtttgtaatttaaggaagatgaactgttttaactgctaccagtcatcatcttgttctctgtaaaacagtggttagtcattcaacacatactgattgagcatctagtatgtgccaggaatatgctagggcagtgaataagactaacatgtttcttgaccccatgggttttaaaatgtagcagaagagttgcactctaacccagcccttcaattacctgtgttgtcagcgtttgcaaggggcagtgcaaccaagtaggtggggatttttttttttttaggagggggaggaggagtactaattaaaccttaaagaacattaaatatatatatctcatagcctttttccacaaaaatacttgtgcatatttcactgttgtgtgaaattatttttttcctagtatttctaattcctttgaaaacaactaagactaaactcttacctttcattaactagttgccactgggcaagatgaaaactgattcgtgcgtgaaatggtttgcttagagtcagcgtgctagtgcttggcagttgccggatagagcccagagtcctgactctccaggcagtttggagagaacatgtcctgctccctgagaagaaagattgccaatgaaatattagaaagtcttatgtctgattttaacctagatatattaagtgttgggaaaatacatgaagtgacatagcacagaggggccatgtgtacacaggagtgttgtatgtgtgggatttagaataatgcgtgaagactccaggataaaccagatatgtaagtcatggtgctaggtagtaacataaatgctgttcaggactttggaggtaaaacagcacttatttttctatgctttccttttaagagaaaaatttaagactaataggatcataaacattgcatttgttttatgttgaaattctgcattgatttttcgatttgccttcatgattatgttcttgagtctgatgacattctggttttcattttcagattcttatttcaccagcattttctttgcactacataccttgttgtaaaatgcaggtttcttggtttccaaggggaaaaaatgtatattacatagtatagctgaaatccaaaatgtctcccagatggaaaagaaagaacattcatctcatcttttcctactggatctggctgggttttggaaaggactttattattttcatgtggcaaactgcgttggcaaattgttcctcaaagtacgcagtggcgtgttcatctaatattataagatatgggcagcatttatgaaagattataaatcttacaaccctcttcagaaacttaaaatacagctggaaatgttttgcttccaacaaatatgcaatcttcataaaattcgaaaagaaatgttttgaataaataatgttttagtttatttctctctagtgcgagagctatttcttttagtcaaaatcgtgccataaaactcttccctcctctacattagcacccttgcctctgtatttatattatgctggtgcatttaatgtatatttttaagtatgccagattgctttgccttgtttttaaagatagaaaactggatttgctcccagggactctttccctaactcgaccagtttaaaaactaagcaaggattgagtcagttaattaatttaaataagattacaaatcaaaaacatattatgcaatcttgatttaattaccacattttatttacttaattgaaaacacactgtagaaagtcagcaatcttgacaatgaccagtacggtgtttttgcattctgtaggttaaagccttcaaaagcaagaactgtaggtgatcctgattatgacctttggttcactcaatccctagatcagtaggaagtcattgaacttaatcttaggttagggcagaaaggtcagatatgattatcctagcttcccattgttgtggggggtgggttggtactacttaatgaagtaccacagccctctggtcagagatgttggcaggtttaacactttttgtgcagggtttcatatttgcaggggattcattagtagtcccctgtggtagaatgatttgctttgattttttttgatatatgatttttgataatatgattttttttccaccttaaatttcagtggcctattttttcagttaattccctgtggacaaatttcagtcttgagcgctaacaaatccttattttaatccttgggatatgactctttgtacctaatctccttgttaagcaaaaaagtggctctttaaaagaaagcttaatgataaaacaactgggatgttcaggaatgaaacaggatatatcgtatatctactctcttgttctgtagttttctttggttaatgaaattactttatcatgaagatcttaagtgtagcaacatctttttaaactatgcgttttgctaaatcaaacgtatattttaaaatcaatgttaaacaacagaaagagggatctgaagatataggtcttcatacttgaaatagtaaatagtttaaaatatgcaggaaactgcatctcccaaatattatattggttctgccaaaatattcagagaggtctaatttctcttattgctcagaactgggtttaggaggagtacggattcactaaaaaaacaaacaaacaaacaacaaacaagatcagggattccattaacaaagtgataaagttaaaacttttcatgaacagcttgttaagttaagttttgcagtgaagtggactccaaataatttaatgccctattgaaaagagacagagagacagaagcagagagagacaggagataaagggagacacaggcacacacacacacacacacacacacacacacacacacacacacacatacacacacacacacacacacaggagcgaagaatgaaggagggagagagagagagaaaccatttcccaaacatttacatgcttatgagaggcaaggaaaacactcagttttcccatgttctttcgttgtcttattttaatacacatctaatagagagaaaataaaataatgtagaactataattttgtgtcacccaaagcaatgaagcaaccttccattaaaactgaagctgcctggtgttttaactgtgctggaaaaaaaaaagccaaattatgtaataggaaacttgattatggaaagctagtgttctgtaaatcccaaggaatcagtcatgggagacagtaaactgcaaagagtgaggtagaaaactttgggcagagagaggggaagagagaagaaggtttggcccaaggagaatagtttgctctccattacccttaataatatagatgtttttgttttacctttttatttccctactataaaatacatgcatttgtattccttccgtcaagcttttgtttcttacctgttacgtcttgtttctggcatgctatatatttaattgtaaaaatatactgttttattatattatcaattaataatgttttagagagaaagaaagagactgttctgagccttaaaaaaaatctcatggtattctttcattgacaatgggctatttcttcacctgcttaaggcaaagaactatgacaaaagggccctttatcacaggatgactaagtttagttctagcaagaggctatctgtaggttaacaggttacattgtgggtttcatttactcctctgatatcccttgatataaaagctatattgttatggaatcatagaattttagagccacaggggacctgaaaactcaccttgtacagctccttctttgcaccaaactcattataaattaaaattatgcttttccagttgtctttttctgttgatcctcaagccatggtgtcagagaataaaaagagttcctaaaagaagtttcatctaggagtagaaagtttatctataaaggtcattaaaactttcttgcctcagtgcttgcaaagtagggacatggaccttcaacaaacatttcttctctttataggagatggacaaaaaataatttctaactcaaaatagtatgtcttatccaccctatcttgtttccaaatatttcttcaggaagttgggaagtaggattgagccttacattagactgagagacttagccctgggaattgtgtgtctgtttccctggcttgccacaagaaatttatctgtttgacttctactgtatgattttacacagagcggtatgctttgtctttctttcttgtgcacttttatagtttatagactgatggttttctgttcatttgacttaaccaaatgtgccaggccctatcccaaagattagggctataaggctaaatagggcaataatagacttcgtgtcatattgttgaggatgtaaaggggatgacctcaccctgggggacttcagggagaaaaaagggggaacattatgcacagacttggagacatcaaatgcaggagacacacaaggagtccaaaggctaaagtatgacccaggtgctgatggggaccagatcaaggtgccatgaatggcatactattttcagaatatatgtaaaggttttagcagatgtttagcttaatcagttttgggtcttataaagatcttcttggtaaaagagtgaaatatgtcttagaaaggtgggaaatcaggtcgttttttcacggcattgttcctaaggtcaccttcttttgatatcttttatgatatgcccttgcccacctttcctaggaagaatcatctgtcccctcttgatttatgtatttttttatttgtatatttctgtctcttcaggcagcctctgagcttctacatggcatagagtatactttttttaaaacaatatttaaaggtcattattgtaaattaaatataaatttaataagcattacagagcacctactgtgttccaaacattaccaggtgtttggaatacatgagccgatcttggctcactgcaacctccacctcccaggtccaagtgattctcatgtctcagcctctcaagtagctgggattacaggtgtgtgccaccgcacctggctacttttttgtattttttggtagagacggggtttcaccacgttggccaggctggtctcaaactcctggcctcaagtaatctgcctgcctcagcctccaaaagtgctgggatttacaggcgtgagcataaatcttaattgatttacatttaaatgatgtttacattaatgacctacaaaaaaaatttgacagttttgatgatttatctacctcagatagttgcagtgtatctactccagaaagttagtgctcagtaagaaatactttacaggctattacttatttattgtcatatatatttaacacacatcttacagagcttccaccagattgtccataaaacattagaatttcctttgcttaatggagacaaatttgatttatagaattggcctctctttaaaacgtcaattagtatatagagttcagtgatactaataattgcttccaacttagatatagaaaatagctaaaggtttaaaaaaagattctgaaaaagattttgaatgtattggtgaatggtgggaagggtgagggaggttaggggaaggtaagtttcccagaaacatttaaactactgaaaaatcatttagcttcgcattattttaggattgcatcataacgattcaagaagtattgtgtctgaataggctgtccatatagagaacataagttttaatagttgctatgcaactttggacaagccgtttgatcacttatgtgtcctaggatcttccataaaattgggtcataggaaaaactgctcactccttaggtaagcttagatattagaagagccacgagagattgaccgcttttaaaaaaggagtggacgaaaggattgaaaagttggtaagggtcgtgcatgaatgtgaaccttttcttgttcctggagaatctttaacctggagaagaaggaactgattgagtttaaaatatagtaatttagaaataacttcattactttttttttagaagaataaacatatgtttaacccacacttaaagaatggggaacatgaaacccacacttaaagaatggggaaaatagagattgagatcgaggaagataaaatgagaggtggaagagaatgagggaggactggttttggttggctgcctccaaaaactcctctctttttctctactgcatcaaaatctttccagacactaaactgggtgtggtggctcacacctgtaatcccagcactttgggaggccgaggtaggcggatcgcttcaggccaggagttcaagaccagcctgaccaacatggtgaaaccccgtctctaccaaaaaatacaaaaactagctgggtgtggtggtgtgcgcctgtagtcctagctactcgggaggctgaagcacaagaatggcttgaacccaggaggtggaggcttcagtgagctgtgatagtgctactgcactctagcctgggtgacagagcaagactctgtctcaaaaaaaaaaaaaaaattttttttcccagacaccagacccagtatgctgggcagctcacaactcttagcagccttgttcctcaaagacttcagccttctggaaggtaattttcatcaactggctggtatctactgccttttgagcatgacagctgctaagagccttgaagagcagtggactcctcccttttggggaatgaggggtgaaagcatttacacaggatttctcaggtaggcacacacttctccatgcttagtcatcccaccagtcattttcagatgcgtgtgttgggatggacagaacttagttatgtcccttttctccctttcttcctaaaagttagttgttattaagcatagagccacattaaaaatgattaattttttcattttaatatgtttaaaccattaaatatattaatcattttaaatgtggctctatgcttaatattaatatcttttatttactgataatgtagactgtgtctgacccaatgcttttggtgcttaatgtgatagaatcttgcaatgattttacaaggtagataatattattgcagttttcaagatccagacaccaagactcttaagagtaagtaattttgtacaagatcatgtcactagtgagggacagagccaggcttcactgtaacatattaaatacacacacacacacacacacacacacacacacacacacacacacacacacagagagagagagagagagagagagaggtggggggtgttgagcaaagtgatggaagtggttaaataaaacctttgggtatagagtaatttgacctaggtggtgaattggaaggggtttagatgtggtctgaataattccttctctgaagtcaaccacaataacagttcatttttggtttctctgccaaccacgactccctggttacttccttttccagcagttggaattaagtgaccgatataaggtgacataagagttaagagtagattatagtgttagaatttacagtctgaaaagtaaatgctctatcatttgctcactgagagggccctctcctatgtttctgagacacagtatacactgctttatttcatgagaaggtatgggctttggcatatgaaggagtctgtcattgtgtgccagtaaacaccagatcattttagaaagtggaattgttacaaaaagccaatgtgtgcctcaaatttagggtctacttcagctttccctcaaatgcttgtggtttttttagtaagtatattttttcaatcgaagaagttggtctgcagttgttggaaatgagaagaaaaagtaatttatagcagaaaagaatagagtttcccaagtgggatgttgtggtaacaggggatgccattgttctagctggatagtttcttacgaatggaagagacttttcattcttttctctgctggacccaaattttagcaacagatgatggaaaagagttttgcggcaccattttgaagttgctgtaactaaacatgctaaggctcatgcagagtctacaactcctgaaataaggcgactgctgcaacaattgacaactttaactatctcaggtgtcatcacaagcttggcattagccaccttgaggggtgcatgtctagaccttcataagagtgagatagctttggagggaaagtaaaacatagggaggctctggtcagtgggtgtattatacataagtaggaattcctaaaaaatgttagaatcgcttgagaaattaaactggaatgtaatatcaatgctgagagacatttgtcagaggaactcaaggtaaaaatagctgatgctatagcaaaaagttatgatttatcatttttatgtagctatcatactccaggcctggaaagtggcccatattgtaccagttttttaaaggaatgtagaacgaagaagattgatctcctaatttataagtcactgaatcttgccttgatttcagaaaaagtaataagaggacttcatgggagatgagagagattttcagagagttctcagctctctgactgtcttcaggagactcgagccagatgaagaatggtcatttctagtttctttactttcattttgaaaaatcaggaaacaattggaggaaaatgtgggaatcactaaatatgcctgccaagatctcatgaaatctgttctagaataaaaccaaaaagacaattaaggaaatgggatgaaggggtaaaattctgatttcagcattaaatctaagctaacaggcatgaggcaaagggcagaaataaataaccaggttttatatgagaagaaactaacaggatgttcttgcatttaatagtagaagcagcaatttcagtatgttaatcacttacctggaaggacagaataaccccgatgaaaaaaaccagcatatgattttcctgcttaaccaaatcactttcttggctcaagtataatggcaaggtttgggggaagagacttgtcagtatatggcagtacatgacagagccgtcatttgtgccccacctatcaaattttgttgaaattcattatcaagttcaaaattgccttttctaggcaagcaaagaggctgctggagctgagccatccattcctccggcgtttactgcaagcctagtgcattcacagccatgaacagcacactgaggaggacacaaaagaagtagacagaatctctgcctctgcttaggagtatgcaatttagttggggcgacaaaacttaaatgctagaaccaataaaagaagattacaaagcaactcgcaagtaagtgtataataatatggggcaaatgacacagataaatggagagggtacaaggagggaagaggagtgagcaaaacacaacagtgtcagatcagtccgaaagggcatgttgcctaacagttgtatgtcttccacgtttctttctgtagcatcaatgaggaatagtatggggtaggaaattcagatatacgacattgatctcttcctccttacctgcaaagtctgtccatctgtcatggatggaaattaaattgattcaaccatttgctctccacaaagccatgttggtttctacctagtaatttatgctttccttgctgtttgcaaatcgattgctattatgggatgtagataaatctgggcctggatccagtaggttgggagattattggagtgggtatgtgtacttgtgtgtgaaatcatggaaaagcggactctcatttctgtgtattttactcattgaataaaaacatactttcaggcttttaaatgcacgtttaattacacttagattgcatttttaagagaatatatctgctttatttcatattgctactgacaggcctcaatatttgcctaaccttcaaaccatcttcaatggctttgtagccagatcttttgtttcaaaaaaaccttgctctagcccaagaaaattatagatcaatacttgtgtttttcttttgacatagaaatatgtatatgcattcatgtagtttgatgagtaaaatgtttctatcaaaagtcttgggaaagtgtattttatttaagcactcaacttcatttttataccttcaaatttttttttcgagtcctttgaggattgtgaaattctttcaaaacaaattaaaaagaaaacattttctgtgatttctttacagattctggacaatcaggaagtccaagccacaatgatcctgccaagaatcctccaggtaaatatgtgttccaggacatttgcaatctgacattgttggagaacaaaggtaccactgtatagataaacaccccataattggtcagctgcctattttgttctggcaggcaggtatgatcgggacaagatgtgattgtgcttaggccctttgcagtggcaaatacttttatattggcgtcatcagtatttacctaatcaccaatgttttaatttttgttggtgtttctttgaaaataaatacgcatatattttagttgtgtatcttttaggtgctaaaataattgctgtttgaaaagccaatgaaccttttaatctttcttttaaaactcataagaaaatgtaaaaatttccatactgcaattatagtttatcaactctcattactttagaagggggttgggggtgggagtggttggttgtgttttcactgaaggatttttgcaagactttttattccataaagtttttattggatctccagaatcaggaaataatgaaagcaggattttttttttctttagcataaggtatcccaaataccctctttgttttcagaagttgttccagatctgaaaatgggcttttataacttggctgtcttcatatagctctgaacatacaacattttgcttttgatttaggaacagtgttttttctcatgagataaaactagcacaagcagtttttcattattaaaagaatgtgaattatattggtgactttagtaaaagagtgctctaagaataaactaacaaaaacaaaaccaaacacaaaaaccccgaaccagctacacatgccccccacctccccaaacaatctcatctgtcctttcgttgaaaataaaccagaaagtttatatgaagtaataggaaaagtttcctcaggtagacttagtttttaggtcctccatcgtttgatcttccttgaagtcgtgcttagctaatatgaggctgaaataccagaagaacaccaaaattgcaagaaagtttatcagaccaattttgtcttaaaatgattttagaaagatacagcaagtagatatacaagtaaaaatgcaaaatcaaaacagactatatttttctgagtcctatgtttttttatttcagaaaaattatctttttccaaatatttattaattctgtattgtacaaaatcatattgttgacaaaagtagtatacacttcaaagataaaaagttctaattaaacacaggtttaaaaatgtatgctaagttgatttttcattttcttcataaatcatttaaatattactgtacattgagagcaaaacattaaaaacagaataatttaaaatgtaattcccagttaaatttattttattttgttgtgtgtgaatggaggattgatattattttagttatctttccaaaaaggctacttagaatataataaattttgtcaaaaattttcagaagttcagaatatttcattaacttatagggtcttttaactttacaaagatttttttctttttaattaactgatattttccctgtgttgcatgatagacaaaatgaattttatccaaacattttttaaaagtctccttactcatcttacaaagaatgaggtgggagaagaggggaacctttggtagaaaaagagttgatagctattataagtcggactaaacaacggatatgttttctgcatttgaatgaaagcttgatttgaaactaataaagcagttattgtttgaagttcatttctgaacatgtacagaaggaattatactcacctaaaactgttctctacttgagctgaataaataatccttgaatagttatgtaacatcattcaatttttcaatatttgtcaagaagcttggttaaaatttcatttttgctgcattcgatgtagcatctctttatttctctgtttgcatataacatggcaaacaaaaacaaccaaggtagaacacctctaatttttttcccttttaaattttccttggaactcaaacctttttgagactgtgtcctgaaactgggatgctacagataaatacattttatgattagttgaaaattgtatatatgtaaatcgtacgttgattctatttttttagagccagaatgtaatataaaatacacattatacccaacttaaatggaatataattagaattttatttaattatccagaatgtaaaatattgactttaatatgccttgtgtattataatactatgaactcaaccataaggcttattaaggaattctattttggacttaatgatagagattattaaagaattttttatgagcttaagagtttgttttgtaatacttcgaaataaattaaacctagaatataaaatgttttctaattttaaatgtgaacaactagaacttattaaggtttttgttttgtagtcaactggagtaaattatactttctattaaaagcttcttttttaagtataagcatatttggtattttaggacataatttatctttaggaagctctttttatctctgtattcttgccttggccaaaatatgaaatctccaaaattgagattttgtgtcttgagaaggcacgatccatgtatgagaaaattcagtctaccaccacaagcaatgaaacaatcaaatcactttgctgcttgaattgttataccaaatacaagctaagcttttgaaaaagatcaccttgaataccaacactttcttatcactggtagttttccactgggagatgtgcaacccatggaaattgctaccgtctattcctgtgtttattccccaacagcttgggaagagatggcaaaaattcaagcccttttggagatataggctctttgaaatctgttccccactgttgacttgaaggtggaatcccatccgatcatcctataagtgcagatgcatatgcctacccacaaacttaacacctcctctggcttggcttttctccagcatcaggcttgaatgtctgactttgagactactttcttactgacttagaacttctgaagggtgaccctaaagctcttcaaactatagtatggacatctacagataggcctttagttcttactttgagtttctgtgttggaattagtatttaagcacaagcagcaaaggcaacgcatttttggaaaggaatatttgatattattttataaaatatttaagtaattttttgtcatttgttattttatagagcttttaagtagcctttatggtatttctttaaacgatttgtgacttaaatgttttgtttgcattctttgttacgtggcaggggtgggcaccgtaatctttttggagtgaaggtgctctacaactcagatagcacccaaggacatggcattgcaattttggctgagaagcgctaagcacttcatttttctagggatacacatttgccttgtttatgatagagtcagaagttatatatttatattcacttcttcttctttgtttttttttttttttttttaacaagttaatccctcctaagcaatagaactaaaaatgtcctctcttggttatagcaaacaactcttgtggaccaaatgagggtaaaccattaattttgggacttagacatgaatctctttttacctttaataattaaaaactccactgctacttttaggaaatgtgtgattgattggatggtaatctttggaaattagctttgacttgctttattattttgtgtgtctacattctttggactatgatctttaagatttcccaatctcaatcccttgactaatcctagaatgggtaaaatccaaggaaaacatagcaatctagaattcagatttttgcttctaagtcagttccaaactaatgtcttattttggagttcaggaaggctggtagttttgtggggaattctctgctggtaatatgacgaagacatgttaaatgctagggcagtttttgcaaattttatgatataaacttttggggcctttctagtatcattaagcagaactttcttaccgggaataacatggacttaacatgctactttcctttttgtaggttttataggtgcttgtgctattttgtgtgttgacttatgcatgtagtgtggcaacacctctgggaaccagtaggattatatattgggtgtacctcaagtaagccaccttatatcctctctggagcaaggatgacactaaataaataactgagtaaatcaaagaaggattatctattaatgatagctatgtgcttatcttgcacttaagaaattctttaagtcgctggctgggcgtggtgtcttacgcctgtaatcctagcactttgggaggccgaggcgagtggatcacgaggtcaggagatcgagaccattctggctaacatggtgaaaccccgtctctactaaaaatacaaaaaaattagccgggcatggtggcgggcgcctgtagtctcagctgctggggaggctgaggcaggagagtggcgtgaacctgggaggcggagcttgcagttagccgagatcgcaccactgcactccagccatcctggacaacagagcgagactccatctcaaaaaaaaaaaaaaaaaaaagaaattctttaagtcataaaaattttgagatagctctctctccaatgttattttatagatactgaaatcaaagccaacagaaggttgtcataaaactaatagaaacaaaccaaataattattaggaaaactagttcaaaatcttcagtattcattgtcatttgttcatctgttgagatcactagagccgatatttgcttgatttttcagatcttagaatttaggacaaacttagtactttttaatctgtacataaaggcagataaattcgcataggtccttgaggacctcataccacgttttatcttggaatatggtgttcaaagtcaaagtcaaagaaaagagaaatttactctggctttttcaaatcatatttcattcactttttttttttttttttttgagatggagtctcactctgtcgcccaggatggagtgcagtggcgtgatctcggctcactgcaacctctgcctcccgggttcaagcaattctcctgcctcagcctcctgagtagctgggattacaggcgcctgctaccgtgcctggctaattttttctatttttagtagagatggggtttcaccatgttggccaggctggtcttgaactcctaacctcgtgatccacccgcctcagcctcccaaagtgctgggattacaggcatgagccaccgcacccggcctcattcacttcttaataaattcatgtctattccttctcatgtcctcatttattgtgtccattaggatcaagatgtttttaatgaggaaaaatgcactatttcatgatacttaaaaggtgattttaaactttggcactagacaatgtgcattcgactataaataggctctctattcataaaaatatttggagaaagatgctgaaaggactggttaatggcaggtaagacctgacatcgtaggtaaaacctttaagtaatttgagaatgaggtctgtatgggtcagtgctaaaatcaaaggactttttttttaatgtattttgttttaaaacatttttcttctttatcctctaacttgtttggagacgtcacattcaataaagttcttaaatgttcaaatttagaataggattcagagtaaaggaagagaggatgagggaagtgtttctttcacaaattactcttaaaaagccagaagaacgcatagccctcagctacataattttacagggtacattatgggaacttgtatacagcccactcatgaaaggttgatctacatagcagttggcaccatgcccagcctccacagtgcttctagcctgattatttgtaatacttaatgtgaaagagtcaaaaaaaggggacaatttaggaatgtcttgtaaggtcctgagagaaggagatttttccatgtctccccagtcacctactctatcagataacaaattatattaattgcctaacgattgctgagttaacaattaaatactacatttgagtcagctcaacattagaagcagagacagccatttgcccttgtgtaaaatacacaccattttataccaagaaccataaacaattcagaaagagctgtctataggtagatttttcagccagcagatatttattgagcatctattgtatgcatcacactcggctagatactggagaagataaaaatgtgagttacacatgaaccttgcttttcccaaatgtttttgttcataaaatctacaaaataatatatacataattataatatatgaaatgtatattacatatgtatttatatttaagataaagactaaatattagtgttacgatgcaggtcttgtaggagttcaaagttgtgaaatactgtttcccaccattgtaggtggcatggtggagtgaaaagagcatgaactttggaattaaaattttcccttgaatgattataagggtcatcaggagaatgagcaagtcagccaaccgctttgtgcagtcaattatgttcatgccagttgtgaggatcacataggggagcacacctgacagatagcaggtgcttgataaaagtgaggggttttttcattctactttctcttcagctagtttgatcaagaaggcttcctgcagaaagtatcatttgatgtggaatcaaatagaaatgtgttgaattgtaatcccagcactttgataggctgaggcgggcagatcacaaggtcaggagtttgagaccagcctggccaacatagtgaaaccccgtctctactaaaaatacaaaaattagccgggtgtggtggcacttgcctgtagtcccagctacttgggaggctgaggcaggagaatcgcttgaacctgggaggcagaggttgcagtgggccgagaccatgtcattgcacagcagcctgggtggcagagtgagactccgtctcaaaaaaaaaaaaagtgttgaatttttatactgctcttctctaaaggcttaagatgacataccgaagttacagaagatgcataagaatagaatgttagagattttataaaggaggcaaaagaaacagatgctttcaagtctcatgatgaaatagaattgtaatttttagaaagcaaatgttgttataagcctattggcataaaaggaaaggtggagtgacttttgttacataaatctcagtattgacatgagaaaaggtacaaatgtatctttagagattacttttttcctaccaagaatttatcttgtagaagcttgtattaacattgtataatttttttcccctcctttcctttccatggtgtttctactttatgaagccatcaactttctgtgtctattgaaacttctgtctgtcctttacttttcctagccctcttactctgcctcttatttcactgattcctacctaccaacttatttcttattttaaaacatacatcttttgttcctcatttggacaaacccctttaaccaagtgtctcatctctctctcttcttcttcgtaacatggcatgaaggatgtcaaagtctcatcttgatttcccctgaaattccatcttgatttcttctcagcttctgtccccactgaaatgattctcattaaatccatgaccagtggtttctttctgtcctgttcttgcttccatattcctgaatatttatttgatttagttggccatgctctgtttaaaactttgcccgtgcctctgaaaacaggacctctcctggtaatccaggaaccttcctatgtttaaaaattgcatatggtgatttcttctgtcttcttaatcagatttttgtctttaattctctgtgttttcagtaccttgcgatttttaaagtatattaaccttttctcctagatgtttacctttgaaatacctctctctcctaatgatttagacctatgtgtccaactacttttcggacatgtttccctagatgtctcatggttaactccaatttaacatttccaaagttaaatttattttattttaccagacttgggttttttgttttctttgtttttgctttttccctttttaagatatcctggagtcaccagaatcctatctagatacccttggttagagttgctcatgatttctttcccaggaaccctttttcttccttatcctccacatattcattcatattctactttgaaaggtctcttgaatttacttttacctctcagttaccattacccttatttgacctctgaacactgtttcttgcctgaaattgaggaaaaacctttaaaaaatgtgactgcctactgggcaagagatgtgtgcacacaagtttatatttaaaggagcagtcatagtggagtcagagatgtctaccccttcccagggaatataagatgcatggaacagtttggataaaaggatgaacaagaggttgtagggtggatatagtcctagccgaggaaagagcatttcacatggaagaaggggaaaggaagggaacttggtgtctgagcaaggcttgagcagcatttaaagccgtgacatagaatataggttcataagtagtgagtcatcaggggtttttcagcaagtcagatttgtgtttcatgacttgtgttaatatacaggtcagagaaagaaagaatggggagaagagttaatttcaacacagtactctcctttcacaatgctgtcagagaaaggactcgttcatgggctacagttagttcaaactttccttaactttacaacggtattttaaggtctcgtgttatctgaaatggtgtcataaggtaacatagaatccaagtaaaattttaatatattgatgtaggcacttaattaatactgtacctagttccagaaaacttccaagagggcttgcacagaaatagcttgtaatttgctaaattttaaaggctattgctataacctatatttttcttagttgaatgtctaggttccccttaagggagggtcagaatcctcatgtgaaaagacgtctgagtcataaattcctctaggtgaggttgtgatggtacctgctgttctgggcagtgttgtagtgatggcttttacccaagtatctcatgtaactccccctctccccgagatggggtcttgccttgttgcccaggctggagtgcagtggcatagtcatggctcactgcagcctgcctcctgggttcaaacaatcttcccacctcaagcctctcaagtagctgggacaacaggcatgtgccaccatgcccagctaatttttaatttttttgtagagacagagccttgctatgttgcctaggctggtccccagctcctgggctgaagtgatcctcccacctcagcctcccaaagtgttgggattataagcatgagccaccatgcctggcctcaggttccttctacggtggcctcctgcatccaaagtttcctctcagtttaaattctttccctctccatatttacaagatctgcttttgccacatacagctacaatttaataatgcaaagcattttctgcctcacagacggaaagctgggattgttttgtatcacaaatatagtggacttgctctaggcttgttaaaatcactgaactttgcagaagttaagctcgctggactaaactgtccaggcactaaggcaactctcacttgtatatttaagcataatgtttaaaaagagagtacaattctatagtaatatattgcaaacagaataaaatattaagtagatatgtgtctaattacccgaggagttttaatctttttctaccttataggattaaaggatgtgatttaaagatcttggacaaatctcctactaaagtctcagtttttctttccttctccgtgactatgaaagcgtatctaggtaatgaataatttaagcaaggacttttgtgtgttaatttgactgttgtttgtttgtttgagaaggagtcttgctctgttgcccaggctggagtgcagtgacatgatctcagctcactgcaacttttgcctcccaggttcaagcaattctcctgcctcagcctcctgagtagctgggactacaggcatgggccgtgtccggctaatttttgtatttttaggagaagtggggtttcgccatgttggccaggctggtcttgaactcctgacctcatgtgatccgcccaccctggcctcctcaagtgctgggattacaggcgtgaaccaccacacccagctgactcttattagcttttgcttgataatgtcattgatcatagaagaatttaagaaacaatggtcaggttttggttttcaaagttgttacaaatctttttggggtcttttgacttacattctgctctttagggaccttggcatctttcataccaaactcctgtttttgctgagatattttaattcctgattccactagacatatcttccccttgcgcagtgctctataccttgcatgtatgtgtgttcctgcagtattcagcaggaagaagacaggaaaaccacttgactttcagatttgatcttattaaaatcatcacttccacttgttaatgtcatgaaacaaacagtgacatgatgaatggtaagatgctggctccattgtgtattttgcagtaatgttttcaatgcaatggatttttcattttaaaatttggtattttggactgctgtcattttctgaattgaagtactttctaagcagagcagtattttctaaataagtaagatagaactagaagatgatcatgtctgttgggacatgataaagtattctgctattttatgcttaccatgtccaaattgatatccaaaaatagcccacatgaataatgttaccttatataatgttgatgggtgaagaagggagtacttgtgagcttttgggagaaagaatgtagaaagaacagaggaatgaatacaaaggctcaggctgctgatgagaggggcaaaatgttttaaaaagaaggtaattgatgctgaatcttaataactctttaaaaacctttacactttgcctctttaactagctcacctagatcattttaatcatttcctaatctctgtagcgatattttgcctcatgtcttaatccctctgatatatccattacaggtctgtggtgatgtgcaaatctgattatttcattcacctccttgtatggttccaaggtctccactctagcctaagcctagctcgttagcatgacatacaatatgacccttcatgatttgtccgttgcacacatggactatgcctttagcgttagccgtgtgctgcttctttgtatctttgctcatgttgtttctctgcctagaatgcttgtactcccttgtcacctcctcagtgagacttcttcagagcctctctgcagtgctgttttacagtactagcatttagtgcactattttatctctattttcgcatctactccccttaatgaattctgagcccctttgggtgagtattgcattcttcttttttgtatacctatcatccaaggcaatgcctacctacagacaatgtccaagatttatgaagcagaggcttagaccaataatagactaaataaataacctgttcttgcagtgtgtgggatcattcccttactcagaacctgacctaggcctagaaaaagcgggtacttctgcggagatacttacagtgatcctcttatgccctgtaggtataccacatcctagacatgattatttggaatatttttctgaactcctcatcttatgtagcatactgatgatgaattttgtagagaggtatctgactgagaattgtagcactccaatataattgctgattcagaatactaatctcaggtggatagagtttctcttctcccagtttgacaaattatagagaagtcctgtttgctgcttttgtgcttttgtttactagggagtatactacagtgttcttagagttcacttgaccatgaatgaggaacctggtaagataacattctagaagctgcaaaaaaatacctgactgttgtaattcataccttcaaaaatattcctgattacactgaatgtttctgattcacttgtgattctttttgtgctgtggaaatagcactttttgaaaatttggaaaccactctttataggtcacttgctaactttattgaggtataatagcatacaataagttgcatatatatagtgtacagttagatgagttttgacatatgtgtttgtttgttttgttttgttgagacagcatctcactctgttgcccggtctggagtgcagtggtgtgatcttggctcattgcaacccctgcctcccaggttcaagcaattctcatgcctcagcctcctgagcagctggcactagaggcgcgtaccaccatgctatgtatttttagtagatgtagggtttcgctatgttgtccaggctggtcttaagctcctggactcaagtgatccacctgcctcggcctcctagagtgctgggattacaggcatgagccaccacacccagccagttctgacgtatgcatatactcatgaaatcagtaccacactcaaggatgatgacgtttcctctaatcccaaaggtttcgtctaccctcatcttcagatgacttattgatctgttttctgtctcttccaattagtttacattactgaatatgttaaaaaggggaaccccccccccccgacacacacacacaacaatatgcccttggtgagaaaatatggaggaacaagggaaatgggatatgatcaagaaccacgaggacatatctttgaaaataaagaactagaaaaaaattccagagaaaatgtttacccagaagacttatacgaaaagtgaacctacaaaagaatagcttcaataaatgcggtattctgtgagatgaggaagaatatcaagaaaaactaaattgctttcatagcgttaaaattgcatcggaggagtaagaaacagcactgatactgtggaaaaaagcattgatatagaggacaaccccaagatacttattccagaagcagaggaaacacagaggttaagatgatgagaaaagggttgatgatgagagaatagaaaattcaaggtttatttaggtgttcattgtggagaaattggaggatgtaggatcaaagacaaatggagaaaaatttgatgagctaaaaattatctatgtggattaaaaggactaatgctattccagccacataatgagaggcttgtatctaaatatatcctgttgaaatttttacatttcgtggatgaagaaaattttgaaatgtcctggatgaaaaacaagttacttctagatttccttttatcgacattaaataacaggagacagtgggagaatacttgaaattgtgatggaaaaaacattgtttttcactcaaggagtttcacctacagtcaaaggcaatggaaatatattctttattactcatggtatcaaaaaatagagttcctcattttatttgcaaaaatgttacttgaatacctattctgactggcaatgtgatgactcaataaaaaaattaagaacaggaaagtataaccataaatatatgaataaaaatatagatagagactaatcatgagaatagtaacaattaaggtgagaattatgaccaagtaattgttataaataagatgacagacataaatgtcaatgtaaaagattgttcttgaatatatgtaaacaagaatgtggttaacaatctgggtccaaaattttagactgcatttttaaattttagtgaaatacgcgtaacattaaatttgtcatcttaaccatttttaagtgtacaatacagtagtgtgaaatgtattcacgtcattgtgcaaccaacctccagaaacttttcatcttgcaaaactgaaactcaatacctgttaaataacagctctccattccctactctccccagcccctggcaaccaccatgtgactttgtttctatgagtttgactaccctagatagttcatgtaagtggaattatacagtatttgtctttttgtgactggcttttttccagattacatttttaagggctgcaaagaggaggaggctggggaggttgggaaaataggaatgacagactagtgttccccttttagaataatttattgttgaattttgctgaagagtctgtattatttgctttgtctctatttgtgcttagatttattattaggtaagcctgcctcttggtgtcaagtacattttcagcatcttgatatggtcatatgactttttcctctatcgtaatgatagcttttctcatagtgagctgcactcattcatggaataaaccctgattataatagtgtattgttcttttgataatattgctgtattcaatttcatattttatttaggcatcttgaagtcacatttacttgtgtgcttgatctttcattggttggttcattgttttgtttcgatgagagaggctacaaatttaggtattcaagttttgctggcctcatagaggcttataagaaagtgttcttcatgaggaagcttgtcttatttcctaaggcctgggagagtgtaaataacattggaacctaaagactagataaaggatacataaaatccagctgtgcactcgcctggacctggtgctgttttcaaaggtggttcttactcacatttctagtatgttctaggattgtcaaatttttaagtacacttatgaatcacctgcagatctcattaagctgtggattctgattctgagggtctggggtagagcctattcttcttcacttctaataagctccccagttatgccagtgctagtggctctggaaccacattctgaatgtggtgtcatagtgattcccaaactttgctgtacatttgaatcacttgggggaacttttaaaagagttctcatgtccaggtctcaccccatatcaattaaatcagaatagctggggttggaagccaaacataaactgctttcaagaatcccagatggttccagtgttcagcaaatttggcaaccactacactaggataatcggtccactcaggttttacacttctctgctcaattttggttacttttagtttactaatacttgcccatttaagttttcaaagttgtagtcaataagttgtatgtattattctctcataattgttttaatgtatttgatttctatggttatgtcttctttttatatttgtatgtcatgtaccacatcatgataggtcagtcgaagacagattacatatggcagtggtcccataagattataatatttttatggtacctttgctatgttcagatatgtttagatacacacataccattgtcttaaaatcccctacggtatcagtacagtagtatgctatacaggtttgtagcctaggagctatatgcaatttcatgcatatagcctaggtgtgtagtaggttataccatctaggtttgtgtaagtacactctgtgatgttcatacaaccatgaaattgcctattaacacatttctcagaatgtgtccctgccattaagccattcatgactatacttgtatatttttactttctctttttcccttaatcaggcatggaagtggtttttctgtcttgttggtctttttagagagtcatttgttttatttatttttttaaatatttctttttttctattctgttaatttcagcttttatgtttaatttcatctttttaatttttggggtggttgtgatgctgttctttcttttatggtaagtaatgggtttctttctttcttctttttcttttcattgctttttagatagtttataatttcccttttgatttttctctttggttcatggtttattttcttaatttctaggtagttgagataattcagtcatttttttattatttacttttatttgccaaagatgagacagtatggccttaaaagtctgtacttttagggatttgttaaagttgcctctttggtcaaaaacatgatcgatgtttttagaagttccatgaacatatcagtaaaatataatttgtatttgaatgatatgaagttagtctttgtctaacagtcatgttcaattcttaaaaagatacattaatagtaaaaattctcactgtgactttattttttataaagtttcttgtattttaatagattgtattcataatattttttggtgcatgtggggtttatgatttatcttctttattaattgtgccttttatccatttataattatctttgttgtaattcagcttaagttttctcttaaccgttgctgatactgcttcctttttgtttgaatttgcctgatttctctttgcctacccatttatttacaactttttgttctctttattatcattttgtgttaggtgtgtttcttgaaaacagttggattttgtatttttcagttgacctaaactccctttatgggaaaattcagtccatatacatttattgtagtgatttatgtattttattttatcccttatattttacttcatattattatatatttttacatcctattttcttatttttgctgccttgattgcattcttatttattgtgttttcttttctctttgctaatttggaaattctactttttcttttcctgctcttgagatgtctgctttactattacttgaaaagattatgcaatttttgcatctactcataggtagtatgattattacctatattttagggaagagaaatgtgaggtgtagaagagttagacagcttgccttaggtttacatagtaaatggtgatagtcttgccccagggctgcctttttagctagtatgctttaacaccgttggagagaggcataccttccacatccattaaaaagataagagggcatacatttaattttattatgccataaaaataaacatagcccacttagtaaactgtaaaataacggtgctaataaatttataaatctgaaaaattgaatttttttggaaaatatataataaaatttatctcaacattagaaagcaaaagtagaatagtattcacgattcagagttatctaagagtcttctctgcaacagattcaaggaagatgatattactagtaaagttttccaaacattcaataactttttatgaaataatattttgttttgttccagagcataaaacatattgggacaatgatcaaaaccattttatgaagcatgtgtatactcctggtataaaaacttgacaaataaaatacaaaaatttccataaaagctttccagctacctgtagaaatattagaagaaactgagccaaccagttcaacagtaaatttaagaactgtcttccatggatgagcaaagataattaaatctacgaattcagtaatatataacaccaataaatgctgttagaaaaaaaccggagaatctctactaatgccaaaaaagaatttgataatattcaatagccattctcgtcagaaaactttttaaaaatctgagaaaactaggaataagtgagtactttttcagataatgagaaaaaaaaatcagtgataaattcatagccaacattttcattgtgaaactgtagatgcaatctcattgatattaggaaaaaaatttcctgctagcacaatttctattttatatatttttaatgtttgtgtatttatgaatgttctgatttttaaaatgttttgtttcttaatgttctggtgaaagaaatatgctcatatatctgaaatgagtccattttattaaaatgaaataaatgaaagttgtaacattaatgtaatgaccttttttctctatcaacttgccacaattaaaaacaaatccctactaatatgtaagtctggcagcaggattgtgagatggacatgctcacagcttgccctaaggagtgtaagttggcaaaacaactttgtggaaagctgcttgacagtttttaccaagagttttaaaagagtttatgtcctttgaccctgtaattctaattctgggaactccagcctaaggaaatcatgagaatggctgacaaagatttgtgtatgaggatgttaattacagtgctatttgtttattatattttaaaaattgggaaataacctaaaatgccaaacaatggaatggttaatataaagtatgatacagccatgcaatatatagtcataaagatcatgcttttgaaaaactttatctaaaaggacagatacaatgttaataggaaaaaagctggatacaactatatttaaatttgatattgattttataaataaatatatatatatatgcggaaaaagtttaaaggactggaaggaaatattgaaaaaaatataatgctatcagggcgtgttaaagttgggaaatttctgactccctccaagatcacctaaatcatcctcgtgggtttacgtttcatattgagagatacacttaattctaaattaatatttgaatgttaacctgggctataggctgagatttaatctctgtgaagaaaatcaccgtctttgcaatgattaatatttctattttataatcacagtttcagctttaacttcaacacaagtttagctttaaccatggatagttcaagtcagttgagaaactgaagatagaactatgtcctgtaacatcactaccagaaaattaccaatgggttagttgtggtatctgaagttatatgaagattggcaaagagctagtataaagtaatctcttcttgtccctttacaaaaagaattaagccttcttttaaactctgttgaagaaagtgaacaattgcaatcatagggctggaaaatgcctatagatgtcttatgtccacctgtttgttctccaaatgaacaatgccagaaaactaacataggaaaacatctgtgtaagaagggagaatctgtgggttgcagtggcttttgagatgctttcttctttttttctgttttttttttttttttttttgagatttccttcacaaagcaagaatttttatatccagtgggagtctttatagccactgagaaactatctctgtaagatgaaagtttcctcatctgtaaaatggcaacaccaataatatgacatattttataagataatggtgaacgtgaagttaatgcctgcttgtgaaggtcatcacagttgttgggaatatattggttatgctacctttgcaaaatttcacatgcctttttaggcctgttcccattggatgacaaatctgtttattgagccaaaaaacagctcctggaactatgcagaataagtcaaatccaccatctacattaatagtccttcgaatacttgaagacggctttcatgaatttaataactgctttctgtggcttctttttttttaatttcaagaatagaacacagtagactgtaaaaatgagcattatcagtcttcctttggattttctatgtaaatgttgtttaacattcaaatggtactgattataatttgagatattaacagttagatatgccattgtgtccctctgttattgtttgtaaaggaggttaaacagtatattaacttctgagtagtgatttactgttgcttttgtcagagaaaaataaaaaagaagtaaaataatataatttgatattgcctttgagacttttcagtttgtagaagtctttatttcctactcaattttattttttttaaaaagcacacatgtagtgtaaatacagcatcacacaaatgcagagttgttcttttcttcctggattaagctgttgtgtaatattgctctgtaaccattaagcagctgctctgcctcagagatgctcatatttcctttggtagacgaagggaatttactatatgaatgtctccaaattgctttaagatctttagctgttgtattagctatttagatttacagtggtctatgaaatgtgaaaaacatgttcctgaaaggcccaaggaccttggaggttacagatggggttatgttagcagcagataacctgacattttgctgagtttcaccccctatcctactgcaggacccctgcccatttcaaaatcctctcagttattttgctacagccctcaagtattgtcttctgtatgctaatgagtaagcactagtaggtatccaagtactattttaagtatctgagtactatttcatccatgatttctttttcactctgccacgtcttggttaatgcctgtccgttacaaaggctatgctgcctgcagagatgcatgaaggtggcagccatctgcttccggtgcttctcccaggctaccccacttggctgattctcacctgtccctgttcccataggtacatggttaataggcatcatcactcatcctcaggaaaccttcctccactaaagtctcactgggctccatgcaggagtagagcccagtgggacctctgtggttttttgcattttatccagtaggttccaaagaagttctgatatatttccaatgcttttcatggtttcggtaaactacctctttccattgtttccgtagattccaatttcttagaacctgggaagttgggggtggggagtggagaaacaccctgctacattctgaattgtcttctttttttctgtgaatagctgcaatagtcattgtattgtctgtgtttgactgcctgactgtcttcccactggtagaattggccttgagctgactcatcccttcttcatgatttggcttccaacaggctcacaccccactccatcttaatggtcatgacttaggagcagatggatctctgacttctcattggagtaataaggaaatgaacttcagattacacatagatattgtaatgttattttgtattacctctgatatagtttatgtaaatacattgaaatgttcatcacttattcatcgatgtgtttcacaaatatttttgggctcttactatttaaacacttccagttctttggttgttactttgtattaaatgcttgacattacacattagtacacaacaaagtaagagatacaatccgaccctaatcattactctttctcatgtgacccaaaagcctaaatacactcttcagcaaacaagttctagggaataacagaggttagtataattatccataaatcttaaaccatctgtatctacattgtaataaaatgactaagatgttaatgtgtgaccctgtttgtaaagttgaattttaaaattttgttctgtgtttatttagtacttactctatatataggcaacgagttagtcattaaggaagatatagagatgaacaaaacccagtcacttctgtaaataaaggatctgataatccagcaatgactgcaagacttgaaaacagatctctcagaaaatctgaaagtacaaagtataaaattagtacaaactaggtgctatacaagtacagaggaaggagatttctggctgggccagtgggtggtagaaggagttggaggagcagtttacagagtgggtggtggttgggctggattttgaaggatgagactagagtgtgtagaaagagggccatctcatctcagggagctgcaggaggaagatatgaagggtaggcatttacaaagtacaattgggtgatgaaaaataatcttgtgtgactggttaagtatatgagctgtagtcatgataaaggaggttgttttgtttttttgttttgttttgttttttttttttttttgagatggagtcttgttctgtcgcccagactggaatgcaatggctccatctcggctcactacaacctctgccttccgggttcaagtgattctcctgcctcggcctcccgagtagctgagactacaggtgcccgccaccatgcccggctaatttttgtatttttagtggagatggggtttcaccatattggccaggctggtctcaaactcctgatcttgtgatccacccacctcggcctcccaagataaagaaggttttgtacttaatatatttactttattaagtttaccctatataaaataaagtataatgaactataaacaataacaaaagcaacaaaaatctttctatatgatagtaagttacagtggtccagaagagtcaaaacatctctttccccgaccaggcaagacagtcagtgtccttttttgtattcatgacttttagcaccttgtacagtgattgttacttagaagtttctcaataattactgaaatgaatttaacctggtaaaaattaattgctcaagaaataagagtttcttaaaatagaagtgcattaaattgggacattttgttataatactcttaaaaatgtatatatatttttcagaataatgacttaatgtggcacctgttttattccctactgagatcttacaacttcctctcactccttctttcattctgtttctaaagaaggtgggtgggtggatgtcaaacatcagtggctcctcagttcacagcagtgaaacacatatgctaattgaatgattttctgtcttttcatgctatgtatggttgaaaagcagtgtggtgccttttgttctggtaaattttctgaataaagatttgcggatcattttggactgtctggaggccagtgtgcgtaattcggtatatagctgatcgcaggttccactggccctaagatcttaatttgttggtaacatgcttatcatggggtttatatttttatctccagtagtaacaactctataagataggtgatttttattgtctccaatttgttaagtgaggaatctgaggcaaaaagaggactaataacctagccaagatttcataactggtcatctgtggctaggattcaaatcccagctctttgatttcagtgctccatgttgctgcactacccatgcttcacatctctgaactgcatctaattccttggtcagccctgaagctttatgtaaaatccagtcaaattgccagttcttagaatctagttttgtttgtttgtttctcagatgtatttcaattctgaggattttcaaacttattctcaccctaggacagaagcaagtaggccataacctcccctgctaaggtattcctcacactcattacacccccttaacatagatgagaatggggtgggctgggtgcagggttactgttgtttgtgggagttctcatctctagttttggacatagaccagctagcaagcaggctccatggccactgtggaccctgccccggtgtgacttaagggtcatgtggcattcccagaggcctggattcaccaccatttgccagaaaagttgtctaattcttgaaataaaaggagtccagtggaatagtagcaagggtgaggaaagcagtgaaatcgtgcaacgtatattaaagatgcccagaaataggtcaacgcaaagttctgtatttgctgtatatacaagttctgctttttatgttattagtgaccctggaacaagggtcggggtgctggtaacagcagttcacttttctttcatcagagaagggtttacaaaagaacggtggctttaagagatctttgacattattccagcaaggtgctaattgtggttgtggtttcctttttctttctttcatttttcgctttagtctaccaggtgctaccgagtcaaaagcattcactgagagcccacagaccattctgtatgcatgggccatggcaaatcaaaccgcatcaataaacctgtacttttagaaagggaagaaaaaattttcctaagagattatttggtatctaaactttttatttttgtttaaacaaacctaatttgcattcctaagagtcattttttaaagtccttattgtaagcatatttggtttttgttcaaaccattggctttaaaacacttaaattctagtgtataatcatttattttactttctgcttatattgatcatttttcctttaatatttattttcaggttaccttgaggatagttttgtaaaatctggagtcttcaatgtatcagaacttgtaagagtatccagaagtaagtaaattgttttgttactacttaagcatgcagtatgatttaaaatactttatattttgaaccttaaatgtagtataaagagtgaccacatattaggaaaatttgaattaaaatcttaaaacctttgatgaaataacaatatattttgcttgattttctaaaatgtttgcattcaaatcatcaaaactttttgttgtacaaaaataattttggggtttttctgattgccatgttattggtattcatttaattcactgttctctgcatgaccatagatggccatttatatcaaaggaagtgtgattaattaaatgtactctatgttgttatgataacccacataagtttcctgtagataagtgctttttcattttactaacattttggtgggggttggagatgcacaggatatacacactaacgtgcagagtgtagagggatgcagaaattaactttgcagattgtagttggatatagatagaaagcattgttatccaaaacaatgtccaattgttttaactggccacttcacctgagacaccattcttagcaggctggatcagatttttctaggctaagctcacctggcaggctacctaagcaaaggggacgttaccttgattaactcttttacttattactagcatgtacaaacatatccaagatgcagatctatatgtactaattatgttaaagaaggtgactcctttcttcatactcccttcactgatttagcttatttatgtaactttgaagggtatattttcacctgacattttgatagaatgcatcacacttcggagtgatgttattcagatgatgtagtcacactctgatacctgcctaagttgtgtttctcatttgggtcatatttagaggtcatgaataagaattatgatgatccagaaagaacaaagagtaatcgagttactgaggataagaataagcagtgttttagagtcttgttgttcagtaaaggaatcttcacgctatcactgactgtcttttgaaccgtagttcctcaaatagctcacatttctaaagtgaacagtgcaaatagcatgtatagcagggagtgatacatatgaacgtttaagatcttaagtagtttatcctttctggtataattctagagtggataaatgtatgcccaaaagacttctctcatgggtctttttacatggtggcagtgtaggagaagaaacacaaatatcctgtattctggtagccccagggtgtgtattcgatgggcaaggagattgtccaaggcagtgtaccttaatgtgtttttccagatcaatatgtgatatccaaaggtatccaacatttgaaagttttcacttttaatttgggaagaaatatgcctgacttaccagtagcactttgtagcatcaggtaagacaggggttatctgaaggggtgtgtgtgtcttccccatactcttctttagcggaaaggcttatggtgctccagttaggaggcttattaaattatttgcttaaatttgtacttctctgagttcaagttcaatggtatattttcatccttcttaggagtagggcagtagagtcagctgtcagaaaatatttatttagtacctcatgataggtaatattatgctaagggctgtcaaaggagaaccacattagaaccttcaaaagcccagatagatattttgaaaaatctgaatttcaaacattaaaacaaagatgaaaattatctttctagaacagttcaaaaccaaggtaaatttaatatacttcattcattcattcttaacttataatgtcatatcctagaaacttttaggttatttgttataacaaacattactgatttgtaattagcacattaattatctatattcattacgtaatttattcagcaaacatttattttctcctccatatgtaaataggtgtctctgaaaggcctgataagttctcctcctaagtgttttaatatatccgcatcataatctttgtttacacaattaaacttcattatttatgaaataggggtttgctaagtaaacataaacttcagcacaacactatgtgtgtatcacaaattctgacttcttgagggtttacagtatgctagtgctttcagtcctctagggttttacaatcataagacccactgatgtgtatgttgactttagctaatgaagccattcagcattaggatagtgatctctcttttgaatgatattatctccatcttaaaagttgatttaggatcagcttttggagtgaggagaacaataagggagattaaaggttggcctctaacccttagaatctgaggttctttggtgcttcatttctaagaggatatcggcatcctcttaaacatgatttgcagctttcagccttcttgtagctccctgggagaggcgctaacactgatctttgcgtctgatgtaagttcttccagaggctcttaagcaggaatatctgactgagacttgctgttcccacacactctgtcattaaataatttccatgtgtgttgttttagtactttggccgtgtttgttaatctactttcctttctgtatctcccatttagtgtcagaatgcatactaaatttttacagtgctcatgcataaatccgtagacaaattattttattgctatctttacaaaattaaaacataatatgtgtacatatttatggaatccatgtgatctctggatccatgcatacagtgtataatgattaaatcaggctatttaggatatctgtcatctcaaacatttatcatttcttcatgttgggaatgtttcaaatcttctttttttgctattttaaaatatgtaatatattgttgttaactgtagccaccctgctgtgctatcaaatactggaaattattctttctgtctattataactgtatgtttttacccattaaccaatctctcttcatctcctcacctccccaccctcccccacctctgacaaccccttcgatgagatcaactttttaagctcccatgtatgagtgagaacatgctatatttgtcgtttttattgctgtcttgacactgcggaataatctttctggaacaaaatttagaaaaaaacaatttctgaagattttaaaattatcatttactacaaattacatctagtttatttatgggtaagcaaattatgttaactatggagccatatgtattcaatagaaactataaatctttgcctaaatattgcatgagcttaataaattgaaaatagtttatgtaaggtggaacctctaagtttcctgttaataactcaggtctatgaattgtatccattactgtgataggaagccagacagattgtttacttcacttgagcccctgaaatactccttctagcatgtaccccacttccagtgtcatatagaacatggttctaataataaattataaaacatgcggttactgtgggatttcttacctcacatttttttaacctttggtgtgcctcaagccacaacagacatagctacattttagctgtccaaataattcaagccatcaggcacttagttactcattggatacaagtattttctgtgtaaaggatgttacagtgtattatataacatgaacaatctatcagaaggctgatagataatccagaagtttggagctgttactagtcatgtatatactgatgtatttaatttttagtccagaaagggagatgttcattgtgtattccgtggttacttctctgtgataaagcttgtacctcctaatcatactttcttaaaaatattttaagttaatcttagcctgcctaatattaaaatacaattcaaagggtagtgaacacatttagaatattcattaaaaatgaggggtaagaaaacttccataaaaatctgcaatccctttggaattttatactcaacttgaggcagatgggagagaggaggagtttaagtagaccacgtatgcttagagtgcatctcaggggctctagaattttgttgcaaagccccagagtacaatttcgtgtgagcttttgaagggctgattaagacaggtaaagaaatggaaactattcttaaggagttctttgacaccaacctgcctggtctccactttgcacattatctctacctatgattttgcttctgcagcagtccctgtttagaatgacctccctctaatctcttactcattctccagagtccagtgccagctatggcttttcgcagacttcttggacaattcaagctggtattggattctttttcccttgaaattctacagcagttttggatcatgtcattaatttggacagtttcattttcatctattttggtatttatgtgtttcgcatgaatgttttacttacccagcttgttgcccaatatttttattaagggcaatatatgagactattttgtacacattgcagccaacacctgccagcagtggacacagtcagtaatttgttgaatgaacaaattttcagcgaacaggttcatttatacctcttcctctgcttttaacacgtttttgaactgttcatctttgctaaccattccagtctaccagggaagaagtttggaggagaaagcaaagaaggaagggaactcacaatggttgagcacgtgttatacactaggcatgattctaggctcttatcactacctatttcatttcatcctcaaaataatcctatgtgtccggttattattactcccattttacagttaggaaactagggcacataacttataatacagagggagtttaaactaaaaggctatttatctctcaagactctgctgattctaacacaatatgctgcctcacagctttgttcatgatatctaaaattaaatttaaaaaatgtgaacagatgtaattatacaaaatatcatgagatattttgataaagacatacaatgcataataatcacatcagggtaaatggggtatccatcacctgaagcatttatcctttgtgttacaaaccaaaaattattattctatattatcaacattaatatcaacattaatatttgagtggattagaagtcatgatattaataattattatcatatcctaactgggaggctgtgaataatgatttttgcttttttttgtgaaacggttctctgtttatttatttaacaatgatttggttttcgagagcctaggtagtgcaaagcagcttgtttggtgttgctgagtgataggactcgtatattctgtttcctccaaggcatttttaactagcagagtgacagatgtaatgtcaactaatataaaggagtgagtaaagaaggttgaggaataggattcgggaaattggtaaccagtgattataatctgattgcctcaaatttccaagcttgaacgttgctaaggtgagcaagttttcaggtcctacccaggttgtatggtgggtattagaggcttaaggtgaagaaagttctctctatctttgaccagaggcatgaaagattctcgattattacatttgaatagaggtcagaaatacgaatgtcattcccagtgcttctttgtcttattcctcagcgcccataacccagggaactggagtcaacttcccaattggagaaatcccaagccaaccatactatcatgacatgaactcgggggtcaatcttcagaggtctctgtcttctccaccaagcaggtactgaaagaagggctgctcatattctcaagtgatacacacataggttcgtaggtggatgataggcagatagataggtaggtaggtaaagagagatgggaaataatttttgctggtagtacacagatttttaatctttcctggttaaatttatttggctgttacaaattaaatgtaattgttgtacacagcagttttaaaaatctttttcagggggacaggtaactaggaaaatatattaatatgacttttgtcctgttgtaggaaatattaaaatgctacaagttaacaaaatcttttgatggctttaaaaatgatgttgctgtggcaatgatctctggtttataactgattcctggtaacttttacccaaatattacatctaagcttaggataatgaaacataaaaaataaaatgtgtcatttacctagccttaaaattaaagaccacagtttgccaagttcttcaattagttgatgttttttgactaatttaattaacgctctgttaccaatgaaaatactaccttccctgagatttggtttaaccattctatgttgggggtcagctagagagagttctctttgctttttacttctctgttaacattctcattttttttttcctgatcttctcattgtaattgccagtcagggtgaataaagattacagatgtgttaatttttttttatttgagctagatcttcaagacccatctcattcctagagcattaaatatatgtgtaatcaaatataagagcatacatgaattctagagcaaaacactcattttacaatgtcaactttttaaaaataaaaggatacctgtatatttatttttctaaagtattctcagtagtgaaagttcgttgaatttgaattaattatggactgggcatgtgtatgtttataaactaagatcaattttatatcagttccggttaaaccattttcatatagttaaattgtgtagcaagataatttggtttattattaaaatagtctctgacatatcaaagtcttagaaatgctttgatttttctaaatttaaaatgtgagcagtaatttttaaattctgtctgctaaatcactgttgtcaacacagatctttcttcctgactactttatataagatactgtctttcagagtaagcaaggtttaaaaaacatttctctagtacttccttatgcatgtaatttgtccccaattttaagtttttcaggcagattttctgctgactcatagatgagagaatatgtttaaaagagagttaaaatgtaaggtctaactttggattctttgggaagaaactaagcttagcatggatagaaattgccatcttctacatcgttaatactctgagaattgtgagtcaaatattaatcatgagtatctacaaatgtactcaggcatatacatgattcaagggcttggaaacacagtgcagtggaaagagcacacttgcggaagtcagacgtccttaccttatgtctgactgcttccattaacttgccctggacagtccactgaatctctccaaatgtgtctccccatttgtaaaaacaaggggattggtttatgtatatgatttttgaggtcaatttcaatgctgaaatcctataacattatggttattattgctgcgaaaagtgaattttgaagatttttaaaaaggttttaccagcataggtgtgaataagattttttttttaattaaagaaaaaatattcactgggcacagtgactcacagctggattcccagtactttgggaggcccaggcaggaggatcacttgaacctaggagttcaagaccagcctggacaactccctctctacaaaaaatttttttaattagcaaggcttggtggcatgtgtgtgtgatcctaactatttgggcggctgtggtaggaggatcacttgagcccaggagcttgaggctgcagtgagctgtggtcatgcaactgcactccagcctggacaacagagtgagaccctgtctcaaaaacaaacaaacaaaaaaagaaaagaattcacttttatagtcataatttcataattgtctgctttattggtgggggcatatgaaagaagtatatcaaccactatgggtataaaatagcttcttaatctttgttctggatagtcacctttcttattcattgagatgagtcatatttccatattaaaatgtatcattttggctgagcacagtggctcctgcctgtaatcccagcactttgggaggctgaagtgggaggatcgcttgagtccaggaattcaacaccagccagggcaaaatagcaaaaccccatctctacaaaaaatactaaaatcagctgggtgtggtgacaggcacctatagttcaagctacttgggaggctgaggtgggaggattgtttgagcctgggaggtggagtttgctgtgagccaagattgagccacagtgtactacatcgtaggtgaaagagtgagacccagtctcaaaaaaaaaaaaaaaaaaaaagtatcattttaaaagtttgaatttggcagtggccttctttttttcacagtcgattttaagaataaagaatcaataatctaagttttaagaaaaagtaaagaataatatatgaaatagtttataatcagtaaaatactataattttttattattaatgatagggttattactaagaattactatttgataagtatcttctaaatgccagccacttaactaaaagctttacatttaacaactcattttactcttccaaccgtctgcctttgaactaggttttattgtttccaatttacagatgattaaactgagtttagataagttaaggagcttactattagcaattcataagtggcctactcaagattttatactaggactgtcttgaccccaaagctcttgttttactttattaccttatctttggattgcattgtcaatgacaagtgctattaaaaggaacattgttagtattgataataataatgagtcaggtacacaataacacaattttaatgttagaaggcaaacaacattaagagttcactttttattagtggaattttttttggaaatacatttgaaagataaatataatgaacaccatatttgttagacaggttaggtataagatggtctaataaatggtatatgcaactagaaatatttgctattactattgatatcttcaatactcaccattatactcaccattattacttgtgcttatgaaaattttcacagtaaggatcttctcagatcatttactttaaaatgtacacatcttcccagaaatcccattaatataactattgccatattttaacagcaaaagacccaaaactatatccatagatgaaaatatggaaccaagtcctacaggagacttttacccctctccaagttcaccagctgctggaagtcgaacatggcacgaaagagatcaaggtgagtaataaggagatgcctctagagaccatgagtaaaatgttggctcgtttcttaagtttcgttgagtcaaaatttcataattaaaccaatatggattgtatatttttttcataaaatgattcctgtagaattatttttgagataatgttagtcaaatgtcgtcaaagttaatttatccaaaatcttatttttacatgtttcgttggagttttttttagacaaaatgatattttagaacccacaattatgtatgtgactgattatggtctgtctacatttgttggttggagtacagcagaaccacaaactgtgattcaattagatccgcctgctcctctctatggagcgttgcagggagccaaactttaagcagtttgcaagtgccaggaactgaaagttgtcatttaaaggaacctgcaattccttttggaagtaggtagaccatatacaataaagaaaagtgtaatgtaagatactttgtgttggagtcaatctagctatgctttctagataaaactgtgacccagttctagggcagctttgaggagaaatataactttaagaaatgggtattgagacccggaaggattgagacttagctcttcttaaagtctgttggatttactatatttcattagatatatccatgctttcccccacaatcagagggagattattaagcatggaaatagaaaaattagctaactgaagtttttgttggtatgtaagcatgtctgcaaataagatcttaatgtcagcagcataaacatgtatttttaaattgtcttttaaatagaattctgcattaaaaaaaatctagcctgggcaatgtggcaagaccccatctctacaaaaaaaaaataaaacgtaagccaagcatagtggtgtgcgcctgtagtctcagctactcaggaggctgaggtgggaggatcagttgagcctgggaagcagaggatggagtaagctgtgatcacaccactgtactctagcctgggtaacagagtgagaccctgtctcaaaaaaaaaaaaaaaaaagtctaaaagaaaggaataatggttttcagcccaggacttgggtgtgtattggtgagggttggggtactctatgttgagtactcttaggagacacataactctgggccttaacagttaaggccaaagtcagttctttattcagtgctccttctttgctgctcaaattttttataccgagtgccatggagtttaaagaatagtgaaaaatcttcatggagacattggcctttgagtcaagtgtacctcctttagcacaactgactcaaagctcgattcctaaatctcatctaaatctccttgagattttaactagtaaagaagtgaggggctgaagagggtggtggtgggaactgagacaaaagcataaccctgtgttaggtggggaggcaaatttgagaatggctgtgtgtgccatgtggctggacacagtgcacatggagggaaataatagagatggcaagggtcattttatgcaaggatatgaaactcaactggagagttttgactgtgagacccccccctcagacggaattttgtctctgagactcccctcatgagagaccccaccaaatctatttttcaggcagtaggtaaaaatcatctttataaaatgtaaataacagcattttattcccctacttcagatcctttagtcaattcccactgctctcaggaaaaaatgggaatcttttcatatcaccaacaggccatagccttggcaggtgacattctgcttcctcttgcttgcacttgagcccactgctttacttgaagttgcgaattcaacaaccgggaccttcctataagttatgacctctggaatgctctgctaactcttcatctggcaaactctttgccatccttcagagcccagcttaaactgagaaatttcagtctaaattctgtcttcctagttttctctgtcaacacccagtactgttctttcattgtactcataatatgtaatcatatagctatttatgggattagttgtctaaatctgtctacactgtgagagaagggaccttgtctattttgactattactgtaaccagcacttaacacacacttggtgcgtagtaggagtacaataagtagttgtataaatgaaccattgataggcagaacaccagtctcattagtgaaggcaagatataatagagacttttaccagagttgcagaagtgaaacgaaaaacaaaaccctcaaccctttatattttattgcttgttttactgacattgtcagcttattctaaacaaagccatactttccttgtcagaaaattcttctggagaagattttaatggtaataaccttgtgaatgtgtgggaatggatgcgttattcagaagtgtaggtgttctttattatagagagtgtcactttgtaagaattgattcctctttaagcctactgaataaagccaatctcaaatcatattatgaaacatttttgaaaagtagaagggaaactgtcattctttttctttgtgaaaacattgtattgtcttggtgattttcttttgtcaagatgactagacttattggaggagtctgtaaaggcatattatgtttagaggaaggaagaatattccattctcaaatgtgcattttaaacacacacacacacacacacacacacacacacacacacacactctgtcactttaattctgaagaccctgaagacttcgtaatgtgcacaataagccattgtgggaagaagactcaactacaatgaagaaatgcgggcagtacagtactatctttataaatttgctaagcccaatgcagtccttttgttcttagaaaattgctttttaaaaatttgcaaaataaaatgcccaatggttgttcttgtccatcttctaatgttctttagacacacttccctgtgatggagggagttgtctaaagcacatattgagtgccactccagtcattgaaatagctttgacatgtcttgtatttataatattttctcctacaaagccctgcactaattgatactcaataactatttattggttaattaaaatatgcttgtgtttaaaatgggcagaaatccttaaaatttactattaattatttcctgggtatgccttattctgttagtgttaaatttgcattaaaatctgttcttgacatagcccttagcaaaattgatttattaaatatgagaatcaaagataacaaaattatggacaatatgtggcattctgctttccctttcaatctgaaataccaacctaaaccattgagatttattctgagtaggcaaaaataaaggatataatatgaccaaattattatatgtattctgttcttaaaataaatcaggcaaaatattaacacaaaatctaggtttatgtaataatatgttcatgcaattttagtaacttaatgaaaaagtatttttagcatattacaataataaattaattatgtccttatgtaatttcttttcaaaacaaaaagttacaacttcctgattataagagaattgtaatttatacttctgcaaatatagacatgaatattttaaaactaaccataatttaatagtgttaagcatttggtagggggctatataatttgcttcttctgatgaatagtgatgaaaattaaatttgtcagcatctatattatgtagtatttatatttttactttgtattattttatatatacagaacaaaatgaaaaggaaaataatactgagtcactagcaaaggggtatccaacaactgttatatttctttcctatgtttcagaatatttctccttgcttagtctcttctgtaaatcctggtcttaaactcctgactgcttctctctctattaaaaactttcttttttggatattgcttttcttcatttaagattttaatgattaatgaatagaaccagattagactgtcaacaggcaagttgaacatttcttttattccaatacttcctccataaaaaattccattaagatcttgtctttcttatttttttttccatctgagtcaattcagagactcaatttctagttgatgtactttttttgaaatttttctttagagcaatcttttgtaacttttgatataagaggaaaaataagaggtcatagtttttcgtctaattcaagttactctcatgagactaaatccagttgtattccgttgctcagtgtgttagtccattttcatgctgctgataaagacctacttgagactgggcaatttacaaaaggaagaggtttattggctgggtaggcttcacagtcatggtggaaggaggagcaagtcacgtcttatatggatggtggcaggcaaagagagagcttgtgcagggaactcctgtttttaaaaccctcagatcttgtgagactcattcactatcacgagaacaacacaggaaagatctgcccccataactcagtctcctcccaccaggttcctcccatgtcacgtgggaattgtgggagttacaattcaagatgagatttgggtggggacacagctaaaccatatcactcagtaatttaacagacaaataaatagtatgcttgaacattgaaaacaattctttataaggtcactttgccactgccattctaatagtcactaatttatctaagtctgaatgtaaaatttctaaaacatttaatagacatttaatgagaaaaaatatgatatgttaaatatatttgcagtatgcagctggggatttcgttgttttttttttttttttttttttttgtgagcagcagcaagatttattgcaaagagtgaaagaacaaagcttccacagtgtggaagggggaccccagcgggttgccctcagctggggatttctaaatggaaatttgaacagcttttcagccagatgagtatttaaacaacctgtaatcttagataaaatataaattcaaaaagactttatgcagtaaaatgttattaatttctacatgtatgggatttgagataatttggttcaatgaacaatttgtcaaatgtctatattatattggaggaatttttataggcattgggtacacaaatatgaataaattaagtttccagcccttgacctcctgaatggaaaagtaacttttactatttagaaaaatcggggactaaaataaataagattatgagagaaccgactccatgctttagagctagcttagttttaaggacgatgagccgtaaatctttacataaaatcaataaattggcatgttagcaaaaactagcactacttggtatattggcatgttattacaatttggagagtagtttgaaaaattaaactggactctcaagctatatttaggcattgtgttctggtgtcttaggtactaaaaaataaaactactaatttttatacaagtctccagttctgttatataaatgtcttctcagttaagtctttctgaaattttaatttgtttccaagtcctagagatttatttttgataattttgaaaatattctcattagtaaggtagtcttaactgttgtgctaaatttcagtttgcactttctagagttctataaggatatagtattaaatgtcaaacgcattaagccagagggcccaagggaacactgggggctagagagtaaaaatgccagtttagtattatgtgctcaatcaggaaataagtaacagtaaataagagtgtgatagcatgctgacagaaccagaatcagaggccagcatttctgttttttctctgtctgttgcccaggatggagtgcagcggcacgatcatggctcactgtagccctgacccccccaggttcaagtgatcctcccacctcagcttcacaggtagctgggactacaggcacttgccaccatgcccagctaatttttaaattttgtgtagagctggggtctcactatgttacccatgctgttctggaactcctgggctcaactgatcctcctacctgggcctcccaaagtgatgggattgcaggtgtgaggcaccacaccaggctccccagcatttcctaatgtgagtttaggaatgtgaaaagatatgctacatacaaaagagtggtcagctaaatttgcaaagtttttttgtaacaaaaatttcaactattttcattcataaatgaatatgcagaatatttaatatgctactgtgtgctgtgaatatccaggagtggctcttgactgaacatgtttattaagtttgtgacttcagaaccttttatttctatcaaagaatccatagggagcattaatcctaggcccaaactttggaacacagtgctctagtccaaaccacagtctgacaaatgatataatctcaagatttctctagagctgtgggagctgagtgaataagcagctgtcatagatggttgaataactgctatctgggagtcattaacattaaatgaagtcctagaaaatggcagtgcagacagcttagtaaccatactggaagaagttttaaagttctctttggggaccaaatagaacaccaacaattccttatattcctgcagttagtatcacagggatgaaatggcaaatattcaaataccaaagttttgaaccagaaaaaaagagagctacaaatgcttttggtggatgaatgtgaagaagagatggtttgaatttgatgttcaagcccaatttttaagtttctttgtttagcttcttattatggaaaatatcaaaagtaaagaactctaagtgaatttctaggtactaccctggcattggaaagcaaacttcaaggatgcttccaccctgaagaggaatgcctcttcaactacactgctacactgctgtaattgaaaaatcacaacacgatcttcttcaaaatggaaaggaaaacaataaattgttggtgaaggctttcatcagaattccccacattgcctcctaattagtgaatgtttgttcccccttcatgtgttctaatcaagaatagcattttggatggggtaaacttgtatacatgttagaagggctggtactgattaatatggaaaagtcgtgctcatatttctgtgctctggaggcttaaagatttgaaaatacagcattttgcagaaaaaccacaatagataattagtttgaaaaaataacaactttctatttaatactgggtttctagcttgatggaacacagcttaaaatagggaagtgggaaacccatgggagataatgtcatagtgtgccatacaaagtttctctgcataagaaaaggttttatttcaaatctttttacatattgagttcatgtttaagcttattgtgaagtagtttggaaagccagtgtcatttgagttattagactcccaatatcatatacaataagaaattgatttttcaggtacagatcacaaattattagaacccttagtaagacataattcaagctcctgtttcacagctaagtagtccaaggatcagagaggctgtcctgtcccaactaatgaatggcagagcctagatctttgttcaagggatttttttcattttctgttatcctgcagcctgcctagggaatcagtatgtaaacttacaaatggcctaggagatttaaacactgcttcgcaagtcttcccagagggacacttttcttggaaagcttaaggaagactctgttagacctaacagaactagaatgagaaaatagaggtgtatttgtgagttttcagggttctgaaagaattctcaaaacaaaattttgagatggtaaaattttacatatacatacacacacacacacacacataaatcaactattattattagtgccaggattaaaattttttcaactaaaataaactgaagatatgaatgcttttgaagaataaatgtggggaagagtttgtttgaaatgaatgtttaagcacaattttaagaagtcttttggcctggagaatattgaaagtagaattgtaaagtgaacctcactgtactgtcacacagcttcaactgttattaacactttgccagtcttattgcatttactatctcccagtttttaaaagtattttaaagcaaatcccagatatctgtcattttgcatgtaaatagatctgaatatttcgaacaatgaactttttttttttacataatcacagtactattatcaatttaacaaatataacattaatttcttaatataatctaacatataatccatgttcaaattccctagaatatctcaaaggttgtcttgtttgaatcaggactcaaatttagtccatagattatatttgtattttcaccttctttttagcctacactgattattcgcctcctttttctgtgttatttatttattgaagaaagcatgtaaatttaaaaattgtcttcaacaagcacatgtaaatgaaacatggaaaacaagattctattgccatttgtggttgtcatttatttattgagcccttcctttctgtcaggtgcttggctaagtttatatctatttttcttttaaacctgacagaaaccccattttacagcttactaaactgatcatgcttaagaaactcatcatagatcatgcagatcataagtagcagaggtagaatgggaacccctggctctcttgctgaagaaacccatgctcgttattgctatataatactgtatcccaaataagtcattgagatattatgtttatgattttgcaaactaattataaaacctctgttacaattttttttaatgcatgaaacttcaatacagatgaatgcacataacttcacaggggttcgtagactccttagagattcatgcatgtagtccttgctctgaaatcaggttaaaatcacttttccatttaataagatagtaataaataatcctaagttctagaatgtctttagtagaagtgtgtgatatatggccagtttaaaatgagctatatttgtcaaaatataaaaataaagtatatatttattatcatacatatgttttcttttagttctgttctagtctttttgccttaagcctagtgcactgtaattgtgattaggaaactctaaatactggtgtggtcttagacaaatcacttaacttcagtaactcttgagttttcccatctgtaaaataacaaagttgtatactaagatttgtgttctaatattttagattttgaatctattggagtccaagaatttgaagatcttcagtacttgagtctttccaaagccgtcattaacatggatcttttggaaaattcagaaagttttctgtttcttaaattattttttgaatgttcattttaaacactctcattgaataacaataattgggctgcttatgtgcttggaggccccgtatattttgctttatacctgaggaatgcgcagttctcacaaatgcatgtcctgtcctgcaccattctggtgcaacaaatgattgatagagattgagttattataacagaaccttgttatggaatcagtgtctcctactttgaaaacaaatgactcagccagacagcaacatttattttctctaaatgactagggatgtagcaatgggagaccattatcctgtgacaatattcggtttcattgacattatctcacaaatgtaattggtccattactaaatagaggttttgttactgatgaatttcacatgatttctaaaaccattaggataataaatatgccatcatagtaatttcattgacagaatgttctttttttcttcatttacatttgttggagaaaaaaaatatagatttaggttgaacttaaacactacaatttataccaattttgactacttttccattaagagcaacagaatattgtgcagagtaatcatatttgcattgagctgctgaactgatgaccttaaaatttttgtaattctttttctaccacactaaatcacatcaaatcataattgttctcaagcaattagtttactacctcagtgtaatgattttatttgaagtaagttccagatcatttataggactttcctgtaaatccactaaagtaacacatcagttaaatcaactctaaccattaccagcgtggataataacagcattagtaacaacaaaaaccttgagatgtcttgtagcataaatgtttttaaatgtatggcttttccccaaatgttctcctctgaaaactcatctgtaatcttgttaaattagagcccttccagtatctttctgacttttacagttaaggttatggtattgattttattttatagcccatggctctcagatgcttaacattaataagactccatagccaagaggttttcccgagaggcatggtgaatagcagctatttacctatgccagtgtttaataagtgacgaaaatatgctccaagtcctgcataattgtttgatgttttttctctctttcaaattaggtttacacacattactcaagaccctttatcattgtctgtctgttaaaatgaaattgcttagtggacaaaagcattttgaagtgtttttaaaaagtagttttcatttattccatattcactgttttagcactgttcttcattattcaaaggatttttttaagtgtctctggaagacatttgtgagcttcaaagaggtttgctttaacttggtattgggtgtaggtgtagcctcgagaccttttttatagcgaagtgataaaattgagacttgtaggaacatgctacttaaccgtgcttgggctaaaatatatggcaagagagacttaaactattagaaaagattttactttactgaggaatacaataatatgctcaagtgtaattaagattaaataactcagtaattaaagtaagaatttcatttatttaacacaaagaccaccatactttctcatttgaaaaggaactgatttcataaatttaaaaaaaatggttgagaaatctaattgaagatgacatcttatctcctcttaacgtagcttgccattttttccagtgttattttagagtgtgataaatgtaaatatatatatataaggagatactttcttaacatggcagctaattattttttgaatcatctggcatcatcatcaaactactgtagtgggattacatccatatgtcttgtcataacattcagagctttttgttaacttggagtgtgtgggaaggacttgttcacatttgccacacaatcataaaattttacatctagaggagtccttagacacagatatttagatattcttttttcttcactgtattttcaaaagacattgttttgcctgtagccaactaaattgcaaatgttacattgaagcatttcattttacagttttgcaatatccagtacctaaactaatatgaagctttccttcttgcagtgtaatgtgggacacctaacaggattcaatattgtcagcccagctttgggaattatttatagtattctgtggagctacaggcaacaattttcccaaaaatatctattttacagtttttacagtaaaagtaatagttatttgtggggaatttgaaaaaacaaactttcaaatatgaagaagaaaataaaaatcacctgtaatctcatcacataaagataacttctgttagtatttcattgtatatatgctagcctgtttttctatgtatttttctgcatttcggtgcgttctatttctatgaatgtatttttgcagtaaattgagcttatatgatatatgctattttgtaagtttttttgtctttataatctaatggcattttaccatatccttcaatttcctttttttttttttttttttttttgagacagagtctcgccctgtcacccaggctggagagcagtggcgtgatcttggctcactgccacctccacctccctggttcaagcaactcttcctgccctaacctccccagtagctggtattacagatgcacgccaccatggccagctaatttttgtagttttagtagagatggggattcgccatgttggccaggctggtctcgaactcctgacctcaggtgacttgatccacccgcctcggcctcccaaagtgctgggattacaggcatgagccaccccatccagccttccactttgtaatgagtacataatatgccacactttggctacaccatagaattttaaatatctactttgctgatgaatatttagatagttttggagtttttgtattataaagagagatacagtgaacatcactgcatgtaactctgtgcctaatctgattgggtgattcttgtctagttcttttcactgtcccaagtccctagcatactgcctggcatgaagtcaccaagtagaagttcagtgaaattttgctacgggaataaatacattcctactgtagaattactaagttaaatcttatgtccatttctaaggcttttggtaaatattggcatagatcttatcaatttacattccctagagcagtgcctgagtggcttaactccattgttataagccgtaataatttcaatgtagcacatggctctataagcaatttcaaagcatgtcctctgacagaaatttatagaacattctttatggccctgtgactttacccatgcacctcttttttatcatttgaattttatttaaaccatcaaggaacacaccatgtgtcttctccccatgagccaggatagctccatttgtgaagaaaatggagaaattgagagggtattgtacaaaggattgtacaaagctttcaagtaaaggcagagcctgcttggtctctctctcctttcttcctccttcaggacacacaccctcacccatcatcagtcctttatttattaggtaaaacctgttaaagtaaggattgctgtcattctctacatggagatccttagaaataaatacctcaaagctttggactgggatcttaagtatctggcaggctagatgctgccccaatctggccttaatagttgtcttattctacataacactcatacacttataaataacctggacactttcctctcttcaacactgtttatcccagggcaaaaacagaggcagagaaattgtggtctttttagctttcagttggcagtcatcttctctgccttctccttgtcctctgggaacagagcccaaactgtttccttgtctcaggactgactctggatttgtggcctgaagtaaaaatgtcagatttcagctacaaaactcatcccacacacttgatttggtagcctgtcatttactaccttatttattttaaataacattattatcttatacagatggttcttttctttttcctgttgtcttccagcttccacccaacattttaatggaaagcagaaatatcccagttaagctaaagctcatttttctctttcagtgctgtgttgcttgacagagtttcaatggagtgatggatgtgttgaccacctttgccttcacccagcaatgaatttggtctctgaagaggttttcaatattcagagtttttgtttatctagaaaactcttttaaaaaaaatctatgaaagtctaatactttcaaaagtccaaaaaatgaagaactttgaaaattatgagggtgtatcaacttgataaaacttgtcaatataatataatcttgtcaaatcccagccattggactgtctctaagctaagtgtgcttatgtatgttctttccttctctggtctgtatcaaactcctctggtcagtatcataccagagggtcaaagttaacagaagttttgcaactgttttcattacactttgagttttcttctgccaaaaaataacaaaaaaagaagatgaagaaaaaaaggaagaaaggaaaaaagaagaccgtatgcaatgaatcaagcctataatctcaacactttcaaaggccaaggcaggagatctcgtgagactaggagttccagaccagcctgggcaatatagccagactttgtccctactaaaaatttacaaattagctgggtgtgatcgtgtgcccatagtcctagctacttgggaggctgagatgggaggatcgcttgaacccaggagtttgaggctgcagtgagccatgattgtgccactgcagcctgggcaacagagtgagaccttgtctctaaaataattaaataaatttaaataaataaatgaaatttacacaataataaaagatagaaaggaaaaagaggaatcctgtaaattgtttagcagcttgataatgtgaaaaataaagaaaatatgtagatattttaacaatgattatagctttataagcacttagcaataaaacaaaccttaacgttaaatactggagaataaaagtagccagcaaatggtgacttgtctctatagggttcatttagacttgtttacaagttacaagtatggcatgtaaataaggaagacaatttaggaatatgtaaaataattacacttttaaaacattttgaaggaatttacttctttgttaaccagatagaaataggactattctatcctagaaaaaggactaaatcataggactggcatggttaatacattttaatttagtgatatggtttgctgaaaataatagcttccagaaattcaagaattcttgcgtgttcttacataattaatttgaaattgttaaaaattgtgttactatagggaagaaaaggaatttttcaaaaaagaaaattgtatgttttctatgtaggctttagtagtctgatttgtaaccttaatctactcgagcatattggaaaagctaacatattgctctactatatgtgaaaaaggagcaggtgtcccagacaggcaggtgttaaggtgctgtttgagcttgccctagatcactagttgacttcaatgaagttctactaacaggtggctaactgattggagtgccatgtgacatttatcccgggagcgacttggatgacaggctgctacagactgaggaaggggtctttgctttgatgaagaaattgccaaaactcatgtctcattagtgtttcctaaggttctttggaagtgaacaacagtttaattaagggctgacgtaaacacgtttctgcacactttccctgcagcattttatcacattagaattgatcaaaattgttgccttgggctgacttgaacagatatacatctggagcgcaatttgtgcaagctgccgatgagtcgagtacatacgctgtgtttcacagcgactctcttcctttgtagatgaaattaccttgttgggagatgagttgatctaactctttatttgcttaagtccttatctctttgaagtgatgacgtgaaataaataacacatcaaggcctaggatgtatatatgttacagtgccaaaaatatatatagtatggtcaggaaaaatcgtgtgataatttgattttgcaaaatacttatttaaagggatgcttaagaataaatgaaccaactttatcagtagcctacttgaacttttttcttacatggtgatcttttattccatattcaactacacgatgagtttctaaagtcatagctaattttccagttataaatgtaaacatgggtgtacacattgaagaataacaccatcaatgtgaatctttttaaaaaaattattctctctaatctgtcattaagaagaattctttctgcaatccagtattattatgattgcaactatttaatgcatttctgtctttaatttctgccctctctactaaaccatgagcatcaccaagacagggaccacgtggttttgtttggcatcttgatgcatagccatagttcctcacacttactagaatctcagtgattgattttcttttctctttgctttacagtcagctacttctcatctggtgatatttattcatggaacatgaattttaagatatactggctatggttatttttctcatcctgcactactagtcatcacttcataatacagtttctttcacatgccagagattctaaaataagctgcctagacacggtgcctgctttacctcttctttctttcatttctacttttttttttcattctcttcccaagtagcatattcttccagcctctacatctttttgtgtttttggtaaaagcatgttccttaggaggtaagccattagtcacctttttaaaaaaagcatacgcagtggatacaagtaaataacaatgaaaaattcatcaagcaatataagatacaaacaaaagatcattaatgaaatctagatctcagggatttccaagagagattacttaaggagaaaacaagtttgttcagtggataaaacattgttctatgcgtggaataaggagagtggaaatgcctcattttctagttcaagggaatgtcatagatcagggatggcacagagttaaaaacatatttctcctgctcctaatggaagccataagaaaattagcttcactgaagtttaaacaaaatggaataacaaagaaaaagagctatttaaaaatgtgatactgtggtagatcttgcaatgagaaagatactgtttgaaggatacgatgccagctgctggtttttataaagtgccatggagaggaaggcctggaggagactaggaagaaaatttttggttcagccaggtacaagtgaaaagggcggtgagaacagaaaaaaaaagtcaaatttttggaaagttttttcttctaaaatcaattcatttataaattattactttctaaatcaaatttaaattgttctgtctgattttaagccatcactggcctctacttgtttctcttcaactaccagcaactcctgcctccctcccaccagtagaaacatcagctaatcctttgcctatcattttgcatctcttttcagctgctttattttatgtattattcaacttatgcattattatgtatgcattattcaagttattatatatttatgcattattcaactttattattattcaacttattttcaacttaatctttttatgtagtattcttcctgcttgagggacagtagattgtgtaaagcgtggtatttgtttttcttcacagaaaggtcactttaaagtatcttttctatatattcattcttcaaacttttttttgtagcatatgagcacattacacatagaaacaatatcatttttcaccttggcatgaagccttttagactgtagacattcaaaataaattaaaattaaaataacactagtttggttcatgattaaaatgtaatagctagaaactctatctttactttttccccagataattgatcttttatttccccttctagtctagagagggtgttttttttttgtttttttgtcttttttttttttttgagcggggattcacttttgtatcttcctaagttcttagcatagtgccttctgcatgctgtgtagcagtgtatttttattaatgggccaagaattaatttcatttaatgagaaaacaaaggcaattaaacctatattctgatactaccgttcttcacctgtctctaaagcaaatcctttcagtttggtcagtgaaccttcccattcttatgtttactattataagttacttttgttgtttaaggaaagagtttgtggttccttttgcaacttgaacagcaaattgtattctgtttcttctgtgttggtctgtataatcctctatgaacgtaccgttattattaggtgcatgcccaaaaaagaattgaaaaaataaatggacccataataattactcagtaaaagcaagtgtgtcattttggctaagaaaatacaaatgctttgcttcttaaaatttatataatttacattaaaaattacataatcatcttcaacttctatataaacacccttgatttatgtgccctttacaaaaggagacccatgaatttgcctgagtttaatgaaaagtctgatatagttacagtagttgcagttgccttaattgatcctcttctccagaaatgacatacccagaacgacactgttctgtttctcaagctgtggtcacattaatttttttttttttttttttgagacagagttttgttcttgtcgcggctggagtgcaatgacactatcttggctcactacaacccctgcctccaaggttcaagcgattctcctgcctcagcctcccaagtagctaggattataggtgcccaccaccacgcccagctaatttttgtatttttagtacagacggggtttcaccatgttggccaggctggtctcgaactcctcacctcaggcgatccacccgccttagcctcccaaagtgttgggattacaggcgtgagccactgcacccggcctaaattattttaaaatgaggtataattatgctttattatttattctatggaatttttagaaactgatttacccagttacattttacttgaaatttatatttaaacataggtaaagcagaagagtatcaataaaaagttcccagtttctttttcaaacagttaattttaaattaaaaatttggaatggcaagtgattgcatcatctataacaagaaagacagaatagaggttctttccacctcttaataatctgtatgtctatgattttacatccattagttagaggcctatatttgtagtattaccttttgaaatcacatagctcttatgcgacattaagtattatttttggcatcttgaagatagcaaaatgagctttgtctattttttaaaccatggtttaaattttttttctttttttatagtggcattaattgctgtggttttatgaacaatttatttctggtttttttttttttttttgaaaaagatatacagaaatggttctctgactcatcaaagttctgatagattcacaacagccagttagtcacaaattgtagcttacagctacaaatccgcctggcattttttgtagactgtgatgtctactgcctttacagtagcatattcatcctttaaatgccaccatgctgaaaatgcatatttaattttatgaatgcctttaccagagcttaggtaatttttcaaatggtaaaatgtaatgataattagtttctcatattaatagcaccataaggtctttttctaatttcaagaaaactcaaaaatgcaaattgtgtacattttgtatgtgtgataaagttttggtgtttttttcttttaataaagatttattttcttttagagatacatgctgaactacttagaagcaaagttatatgatatctgggatttgcttcaaagtaccacagggagagaaagtgtagatggggataaagatgaaataagatttgttatgagttgatcattgccgaagttgggttatcggtacgtgaggattcattacaattctgtctacttgtgaatacagttaacatttttcataataaaatacaaattttatagctcatcatttttataacattttactatgagttgataaacttccattaaagtcaacagcactcaagatgttaaaaccaaggcatatctctcaactccctgcttattccaacaaactgcatggtatagtctcttagtcaactaagatgatgacagtctacattgcttaataatttaattgggtgaaccctgttaaaatatttattgcattagttctatcatgattcttatttcaagctctcatgatctatcttttggcagtattaaatatttatgaaatgaatgagtgaatgaagcccgaaatctctgaattcttttcctatcacagcacctttgcaattccttcttacttgtccacatcgcctcactagattttaagctttaaaggagccgaaagtgagtccagttcaccagtgtgtcccaggctagtgcagcatgtggcatacattcggtcttgaacaagtatttatggaatgaatgtattgatgaatctgtcttctgaagtggtcttcatgatttctgtctctgttttggccagtccgccctccatttagtttctgggggaattgttttaaactgtcattgtgatcatgttttgcccatctatggcgtttctcctatgagggtaagcattcagacgtttgtacaggaagctggagacccgtcatcctgtgggacctgcaagaggcttgctcctcttcttcatctttcaccactccacacactgtttacttgtgtattctgtgccatctttttttctgagtatttcctctctgagaatgtcatcctcattcacattttgaaaatggcaccaatgagaaatgccttcctcatcctggggagactgagacgatatctgtcctgtacatcgcagctggcgatgtagcagcaaatgccaaaacttccctgctctcaacacacattgtacctctcaaccattcacaaccattttcttctaatcattttcctcctcaccaacagtgagcatccctagagcaggaattacttttaatttctttgacatcttcattttacctggccagtacagaaacccagtaaacgtttgcagaaggagtaaattaaggaatgtactttttgctaatcaagtgaatgagttttccataaaagctgtgaaatcagtgatatcgtgaccaacatacctgaaggttgtttttcccatttgcagcagttatcctctgtcgaaagacaatcttctgaatcatataaatctcagaatgaaatactgaggtaaagaaggcctttgtgtgaaccaaggggctaaaggaaacaagactttgggtttttagaagtttaagatttatttagtaatgggaataattctgatgataattttaatgaaggcttctgctagcttccatggagattgaacaaatatttcagagctccaagacagctggatcgttgacactcagaatatattttgtaaaagagccaaagtataagaatactaaaatgttgcaagatgagatctgtcatttgttgacatgaaccttagagcttaagaaagtcatggagctttgggtttttctctgtttctcgcagatatgtcttctccgactactatgaagaagcctgaaaagccattgttcagctctgcatctccacaggattcttccccaagactgagcactttcccccagcaccaccatcccggaatacctggagttgcacacagtggtgaggagtttcaagcatagaggagaagcctccttcttgtctgtagggcctaacccccttagggacggagcaaaagtttataaatagagctatggcaaccatattttctcaacccatatggtgaggggcacaatccgatcaagtattttttcttctcaatttatgagaaaagatttctctgggtgcaggggctcacgcctgtaatcccagcactttgggaggctgaggcgggtggatcacgaggtcaggtgttcaagactagcctgaccaacatggtggaaccccgtctctactaaaaatacaaaaattagcctggcatggtggcatgagcctgtaatcccagctactcaggaggctgaggcaggagaatcgcttgagcctgggaggcaaaggttgcagtaagccgagatcgtgccactgcactccagcctaggcgacagagtgagactccatctcaaaaagaaaaaagaaagattttcaaagtcatacaagtaaataatatttataatatgtgttttaaaattaccttaatcaaaaagattgttatcagaagaatgtggaaaatatgggtacatagctatcttcattatagcttcaggattagtcctgatattttactaagggaaagatggaatttcagttatgttgctgagtttagagtgtttctaaaggcattaagacgtaaggcactatttctgtagatgttattttctacatataaatcaatatttatctatatgagagtaatcagagaataaaaggtactttttttgacacttgttttatatgcccaaatcctttgggctagtacacttgatattgtgtctgatgtcttaatttaagtaggaaaatgaatccaatatttgacatttgtactttaaccaacagctaataccaaatctttcaaaaattaaaaatgagatacagctaataattaacactgtgtactttttacctagagaggagtagactgcattttaggtggaaaaagttttatatataaatatgttaatagtgaaactgttattggtttaaatttatagttaggcacttcctcatccttctgactaatcgaatctggtttttaaatctttatgcaaacaatgtaacatcttttaaaataaagtccttattagctttggtttgtaagtatatgttgatatttgttggtgctatacttaaaaaaatgcatggcctttattgctatcattaaaaaattacgaaattgagagaggactatacaacttaaatgtggtataagaacttttgcatttattacctataccattgagataggtgaaaaaatcagtaactgtttcataggtttgtaatgttgaatatttggacagaattaactgagaagtcaaatcacccatttgttacgacacctgatgaaaatattcttatttctaacgtgaaaaaaagtagacagtatatttttatataacgaaacaggagagacctagatgagccctccaccttggtccttcacccgatatttgttctgtatctgtatattagggtctgtgttaggcatcttgttcagaaagatcgtttctgtccttaaagagttcaggatatagtggggagagagtggggccacgtcattggctgggcatctaatctgaacatgactagataacctgaagaaggtttagatacctggaagatatgtgttctgagctaaagtgtgatggcaaagttcaccacaagaaggaacaacaaactaggaagaagaggggcaacctgggaggcagagggacatactaggaggaagaggggcaatgtgggaggcagaggggcaaactaggaggaagaggggcaacatggaaggcagaggggcaaactgggaggcagaggggcaaactaagaggaagaggggcaaactgggaggcagagaggcaaactaggaagaaaaggggcaaactggcaggcaaaggaggcagaggcaacagcatgtatcagtgcattagaggccattgcagcaggcaactgccatatagccaaggatccacaaatatcttcgtctggccagagatgaagccaaagaagtgatccaggactcggtctcagagtacctgaggttgtgtgtactgaaaaacctgttgggattttattctggaagcagtaggaagccactgaaataattttagcggagaagttacatgattataatggtgtttttaaaaagtaattcacatagcactataaaggatgttttggaaggagcaagactgaaggaaagaagacaataaggctttgcaataatgtatgcaagaaatacacatacatgtgtatgtattctttcataataaaggaaaactttttgtcttgtattttacttttcttatttttttttctttttcttttctttttttttttgagacagggtcttactccaggctggagtgtagtggcgtgatcttggctcgctgcaacctctgcctcccaggttcaagcaattctcctgcctcagcctcccgagtaactgggattacaggcactcaccaccccgctcagctaatttttgtattttttttagtagagatggggtttcaccatgttggccaggctgatctcgaacatctgacctcaagtgatccactccacccaccctgacctcccacagtgctgggattacagccgtgagccaccatgcctggcctgcttttcttatttttaaaggactagaatggcttttatggaaaaggtagtcatttttactctcagtttgaaatacgacattttacccagtggtatcaggccacctacagctcatgcaagcacagtgccaggttgcccatagatgtgagttcgggtttgatttctgcaatttcacttgaaaatagatctcctccagaactattaaggccaaattaatctcaaaagctaaaggacccaagatggaactatgtatatatctttccagggtttgtgtacagatgtgagcaaaaatcatggttaaaatgagctgagattaagagcatttagacactaagtaaaagatgcccagtttttcttagatgtttgtatttccttaaatgatactttcaaatgggtatacttcttaaataaagtaatacttcagtaaagagttttgttttaagaaatacgcatttgttctctgaaatgcatacatttgatggaggatgctcaaacttcagtatgtaggaagattacatggacacttatttaaaatatacattttggtgccttacccctagaggtcctgatcccctaggtctgtgtgtagaccaagggatctgcattgtaagaacaatacagagaatttcagaaacagtgctctggacgttcagagaacaaagtcgtgactataaaattgaatttatgttttttctattctatacattcttaatttcttatatcttctgaaaaagttttttttgggagaggtaagcaatacatcccataaataggtcccacccccccacccacatagtttcaaagttggaaataaatcattctaggtgatttccctttgtaggttatggctaaaatttattttttttcatattctttaagttgtctcataaaacattagacatttatcgtttataatttcctattatttgaattgggaaatattaaaatagaaagacatttacttttcacttctacatatatttgttggtagttttaatttgtatttctatgattatttctctcaacattttagagataatgatcatacgattacactctttctccatctttcaaacttaagatttatatttcaaaaactgaacaataaattataagaatactaatgttgagaagttatagtaaaattgaacattgtccacattgcatgtgttttatatagtatttccctttataaaattattataaaatatgtgatatatgggtaaagtaatatacttacctatatgaaagcttaaattttcattgctgtgtgttttattcttggttttatattaacaatatcttttaaactacatatagtaaaagttaaagtagaaagaaaaatagttgcagaatagagctcttttggttttgaaagaaacattttcattaggagagtttctagctctatgttccaatgttcataagcatttataccatgaccagacaattataaatgacatgagatgatgttgtattagttattgtctttccttctaaacaattgccaggtaggatgtacagggaaacgttttatttgaaattgaatttcacttttgtttttaattttggtagaaaatttttggctcttttgccctctacttaatgctgtgacttgctctggacttatgagacaaagtgttttttgtttgtttgtttgtttgagatggggcttatgagacaaaatgttttttgtttgtttgtttgtttgagatggggttctgtcaccaggttggagcgcaatggcgccatctcggctcactgcaacctccgtctactggattcaagtgattctcctgccttaagctcccaagtagctgggattacaggtgcccatcaccatgctcagctaattttttgtattttcagtagcgatggggtttcaccatgttagccaggctggtctcgaactcctgacctcaggtgatccacctgccccagccgcccaaagtgctgggattacaggtgtgagctactgcacccggcctaaagattttataatcaaagaatatgttttcaacgggatatatctttgctcaaagaagtgttttatcaagtattgacataacctataaaagagaaactgattttgtaaccactcacagagccaggaagcaagattgttaattttctagagtgatgttttatctctgtgtagttagccgtactggtgttgagaataaaaatgaaaaagtaactgttgatttaggagagcttggttaaatcatggggacaaaaatgaatggttaccagttttgtagtttcacagcattcttcaggatcagaatggagcaataaggtaaccagctgatgagtcaatctttccttttctgtcttctgcagtcatctcaactcgaactccacctccaccttcaccgttgccatttccaacacaagctatccttcctccagccccatcgagctacttttctcatccaacaatcagatatcctccccacctgaatcctcaggatactctgaagaactatgtaccttcttatgacccatccagtccacaaaccagccaggtaaaaataagagagaaaataagattagcacctaagggagatgggacagatctaattctgagacacaaaggttagtcagacagtgtgtctggcagaacgtcaagccttgaaatccatcttcaggaagttgcttggtgactcaataagtttttatttaaaggtggctgaatgacaggtaggaagtgtgttgccccaaagggtacatttgtgaagatggtttaatgtttttggattttcactgactgaagggaaagtttatgcagaaagtacattgacaggaaagctctgggctggagttcacacctcttaaatacctggtttgacacagagacaatgtgcttatttcaggcaggagtaaggtatgtgctaaaataaacacacacaaaagaacttacagttgtatttatagaccaactattaggtattaaaataagctttggtaatgtaaacattctcagtgtttgatgactacttgaatattctttgcagagacatgacttacatttaataatgagtgacattactagaagcgtctttcttttttttggaaacattgtgcagtggttttggggattcattttgtaagtgtagtgactcatgagcatttctcactcccctagacatatggtttcttctaccaagaggttacttcataggaatttggtatatgagcattttccacaatcaagtagacagtctttgtgccagacctggggctatcaataattgtaatatctaaaacatgtaatgtaattttgatattaggatctgatatttagctttgctgctttacctctaagactcctgtccacttattataccttttaatattttggagaattttcacaaacattccgtcattactacggtggaacattcctgaaatgctagtaaatagtgtgtgtctatcaatttaaattagcaaagaaaggtgagaaaaaaatccctttggtcttaatttgttaaaatgaaacaaaatggtcctttctgaacttttaatttagaataacaacgcatccaggaccctttgggttacttaaaaagttatcattacttttagtttgactgactgagatattaaactcaatattgaattttgaatttgaagttaaaattattatttgtattttagaagaaaatgttaaaatgttgtagcacttttcatgactgaagtactaaagacagctaagtgagagtgggatcttagtatatcgtttagaaataaaatttgttgtcagctcatggattcagaagtctcagttccatagagcattttgctagactcagctgggaacagtgcacacaaggtctgattttaatttgtgtagaatttccatgaataacaaagtctaattaagacatccattaaaagtccttaacgttaattcagtgtggaaaatcttagagttccattggattttttttttaactgatgtcttaattaggcactgttaggggaaaaattatgcaaattaaaatcaggcccttagtgttacacatttctttaattattcagtgcttgttttacgtatatttcaatttctttataagttaagagggcatattaggtgataatctgcctatattgttctcagtttttcttcactttttcaagatacatatcaccttctaaggaagcatattactctcatctcaaaaaaaaaaaaaaaagaaaaagaaaaactagcaacaaaaaaactctcaggattttgtataataggaaccgtgtataaagtagaataatcctttcctaatgctgttagcttcaccttcagacaagacatctctcttttctatctacagtatgaaagttcatctattaacagccttaaaagatagaaatttttagtgtagcttcatctgtttgaaccagtagaaaactgaggagaaaatagccctcaattcttctcaccctgagttttaggaaagttgtctgcattgacttgggaattctttctttgtcacctttattcttttcaaatgagagaagtgtctactagttcatgttgttcaattccagtaggtgaagtttgtagaatggtcagggtaggataatatatttggtggcagcatttccttgaaattattgtcattctgctccagacattttgttccaggtaggtactttcagactgttttggtgaacactgtatgtagaaacatttttaccattgaatgtaccaccaatgataaaatgagacctgtcttctttcttaagatatttaaagcacttatttccagtgttcagataaccagaaatggatggcctgctgtagaaacaaactactttttccctttgaaaggaaaaatgggtctttatagttaactgcagattttttttttaaggaacagtgtatctgctttgatttttaactccaactcaaaaccaattaatttgcatttcaaattagaattcttggtatttaccattttagctttagaaatggaaaaacatcagtattccttcaccattcacttctagtcagctgttgcttcccaatattctccagcactgcactgattttgatttttaagataagcaactgagatgccttttcctccccacagcaattttgagattaattgcattactgctgcaccaattatagtgagacagtcatgctattcaatggaatattttgaataaaattagtttaaagatgtaactctcccataggtttccatattggaaaactctggtcaattttcctgacatcaagttaaatacttaaaattacccatgatgaataatcaggatattcaggaagtccattttctttatagaataaataatgtggcctctgaggagcctaaccgaagacttagttcatgtctctaagtcacaatatttaagtgttattagctgttcatctttttctctaaataaatgtctacttgtaatttatgtgcagatatttagaaaaatattctgcttcattttttttttgcctttaacagttcagattataaagactatatacttgccgagaatagcctcccagcaaattgcgatgaacaccgtgcagtggagaattccaacatgggtataatcaaaaataacattctcagtctagaaaaatatattccactatttcttcaaagagtgtatccttaggattttgtttcctaccacggaaactatttttgtacccaggagctaaaactcagatagtaacatcttttctatcattgcccaggggattttctcagttaattctcacaaatgtcaacaagaaatgttttgtgtaactctccatgcaccaccatggatgtaagagtaactcaaataacaatgctcatttgcttgtcctctgcttcccctcagtacagtttaatttactttggaaatcttttatttgtaggtgtaaggacaaacgtagctcagcattttatatcattgtatgacctctgaaattttagatgctttacatcttattctatcttcttgtattagtaaatcatcaaaagttgaccatagatctcggaatctaaattgcctaatgtgtgcatctcagcacacctgtgtgtaagagagctagagttttgtatgcaggagaatggttcttgactgtaaatgatgaaaattccagaattcgttgtatttgatctcctagatatttttgtgtcctttgtttcagtgatatcatcatgtaggtgaaaattgtgttctaaaagccaaaactgactcattatagaaaatgaagagcagagaataaggaagcattgggttccaactgtagctagttcagtaaggaattccattttagcctttgggctaagcatttaagtctgcacttgagtttcttggcctactacatgaaaggatcaagtctacctggctctcaggggtgctgtaaagaggaattcacctataccatgacgtgctttgaagatgaaaaccttctttgaaatgctgctgctccttattactaccaaccattgactggcctctccgactccgactcgagagggcctgtgtggcgcctatgcgcagtgtgctggatccacacagtcgtgtgtgctgagtggacttgttgaacaagatgactgccttttggattgcttcacccggcattctgtttttgttttgtagcctaacggcagtggtcaagtagtagggaaagtgcctggccatttcactcctgtcttggcaccctctccccatcccagtgcagtgcgacctgtgaccctgagcatgacagatactaaacccatcactacatccactgaaggtgaggcagcttcacctacagcaaccagtaagtatttccataggaaatgagaaatgtccatcagaggcaccattggatatctgatccaaggtggaaaacacggcaatttttccagctacctgaccagatggagatttctcatttaagtggagctagcaggcatggatgtggccctgctatcacaggctctctcttctcaaattccagtcagtgaatcatatttgaaaagggagaagctcacttgtttaagttaacagctataacaaaaataataagtcatgcctgcttgttcaaggtatacattgaaattgcactgagtaacataacgcagaatacaaagttttcgtatcacccaaagagagattaggtaattggtacttattggagcattcctatagaaatcaagccccttcacaaagcagatggaatcagtgcctctgtaaggtaattgcatgtttacatcattgtaggttatgtcattgttaaaaacagtcgcataaggttgggaacagatgaggacatttcaaaacttagtattaggcacatgtaagctacctgtactttcactatctgcaagctttttttttaaaaccttttgattattttgcttatcattggtacatcaaatactgtgctttttagtgtggccataacatttaaatgtcagagatttagccagtgaaccttcctaacacgtaccaataagccgcatcattcctttgttttttcatgtaaaatacttagaagtatagaagaaattaattttgaggtggtttcacccaactgtcagcttcttagtactggagctggaatgtacaaattggtgaagtagaatggataaagctatcgaattggtggaattagcatgcacctcaccaattatacagatatcttcaattcaaaccttttttttttctttcttagagcaagaaaatccccatgatcttgaaatttccatgtgaatcagagacaatcagaggcatgcaccactcattctttctcagccattggaaagatgctcttttttttttatggtttctgaaagactaggaaggaaccctataagaaaaatggacaatactttgtacagtgaattcagcatttctttctcaaaattcatgagccccgtcaattaataagttcctataggcttgtaatacccatcagtaattcttaatgcttagaatacttccctgaatgcacagatggatgcgacctactcaggaaaaactaaaaattattttgttctagaggtttgctatgtgcattacagtcaccaaaacactaagtactcattttaaaagtggatgtcttcacatctttgagcaaacaatgtcagcaatttaaataaaagcacacagaaaacaaagatttttttttaagtagttgaaagattatcacaggataaatggtcaaaaccaagttctagaaactctgatgcctactcttgtggtgttattaatagaagagattcaggagaggatcagacccaaatgatcacagttcacttataggagtaccctcagcctgtttgttaatgaattgtttttatacttacatacaggttgttcaaaaagggatctgatttgactagtaaaattacaaaatattcaaaaggagtatcttggttgtataaagatggctgcatcagtccattttccactcctacataaaagaaacatagtgagtagtttttctttcctataaacaagcttgtagctccagcttcttaggcaccaccagtaataaaaaactggtcattgaattgatatagtactatggtcaaagaaaacacagaagccaaggaaggctctttctcatagttgaaaagaaaaagcagcatagatttggtgctcttctgtaagggtgaggctcatctccggctgtctgtgaggtgtggtgaattccagaggcttggagattgagtaggggtcactggttgctgatggctgccttgcatgtccccttattcaggagcaattaaaatatgaattgtgagcatcttcactgtttttaaaaagttgacctaaaaaagcttccatggatcaaattctgcagtcctttaagtgaacaaggcagaattaatatattggttttagaaagccagttcatttaaaatgaagcctggattcctcattaatctggtggttttaaaccaaacagtgtagctttcttcagaacaataaaggtaatatatggtaatatggagcagtgggattgcctagttctgggaagatacctcagtcctttccttgtgaaaagtaacaaaagtctttaggagtagctccctattcattttttttttgtgtgtgtgaaaaatttactctataccaaaaagcaaaaagcagttgtacaaaaagtacttgcaaatgagactataacaatgtaaggaatagtcaccatatatacttactacctagtggccaactatttaaaggtgcatcagctttcttcctggatcagttacaagtaattgatttttgtatgtgtgcttatgggaagtactttttttcaaaaacattcctatcagacttgaggccattttcacaggtaaaataccgagctgattcattctacatgatacaggcttctccttcatgatagtaagatttgatttcctttttagcaaaacttttaagaaagacattttccatcccatatcattaagaacatctgcttaaattccatcattaaaagctgtcactttttcctggcggactttcagtctgctttacatttagaatcatataccatcattgattattttatattagacaactactatctggtgaaaaagtacgtctaggaacagggcccttctatttatccaatccttagtacctccacaggacagttactagagcatgtaagtgtgagacacccacactgaagtatgagatctgctttactggatagattttttagggggaataaactagttgatttgaagtcaattattatttcttttctatcacttggtgttcactcagacaaaagagaagagaaatgaagacactttttttttttggttgcaaatcccacttctctgggtttcttatacatggacagggtgttcgttctgatagttcacaatttttatctttgtttttgttcttccttaatcagcctacacagcctcaggcacatctcaagccaatcgatatgtgggactaagcccaagagacccatccttcctacatcagcaacaggtgggcaagtttcacccaggtgtgacggtgtagccacgctttcgcttccgtgcttctccatgttgcctctcagatccggactcagaagggggctcccggggcttctgagaccaaaactgatcatttcatttcccagaattttttctcattgatcctttgtttctcacctctttgagtagagtttctcaaattggctcatgaccttttccatctctgtagcatatattgataacatccatgagtaatagtgtttcagccaaagtgtatttttctcagtctcattggctattgagaacttacagactatagctttcaaagacaaaaactgcaaactgttttaaagccaactagaatagaagcagtatataattcgagtttttgagtgatttcttattttccagatgttttgctcctcacatttgtattttagtccaagacgatgagttacgaagttaaaatctcaggcgacacttcattcctattattttaatagctttaaattggtttactgatttcagatgtgataaaacacttttttttggttctgctttcttacatcatttatgtttctagtagcattttaaatttcacatctcattaatgctgtaaatttaatgcaaatgaagtgtttacccaaactgtgaaaacatacagccaggattaatggtggcttataaacagatcagccacagtcaaaagcatggaccataccaatgtagaaatcccacgattctagttacaggataagagacgtaattctaaacagttccgaatttaaatatattttatgatgcatatgtttgctgctctcaagttttgatagcagagcagtttgaaattaacagtatgcaaaatattacataggggaaaattaggctataataaataataaagagctggtgttaactaactcgctctttatttataagttgcctgtgcatatatatgactttttgtgtaggtagtaagatacttttgcccacttacttcattcttgatctgttcacctcacatacccttgttgtgacctacctcaactgtgcttggtgtggagttctcaagtcctttccagttgcagcccaagggggcagactgcatattagaggtcaccacatgcagagctcagagaaaatcataaagatgatagcttattcagaatacttgatgttttgccaggtttaaaaaaagcaaaacaaaacaaaccaaaagagtgagaactaactgaaaacatctgtacacagttatgaaaataccaaataataataattagtggttttgccagccattggcttctcaacataattctctggaatgttgcttttttttcacctctaaaattgttataacacgaaatgagttataattactagaatatggttctatttgacagatgtatgtgtccattgtgttttttaaaaaacatatgcaggatgtataagtttagaaacttgttcttttaaaaatcattacacatattctcaggaatatttttctcatgggatttgcattattctttatgacacatctctaatttccagttaatttttaatgcataaaacatgcctccattatttaaacctttagccccaaatgctagttagaatactctgaccaattccatgtatttggaggcagccttcctcctccactaccctaacctatggcagctttaattttcttatcccttatgataaatgtcgaagcctcatgtaattatgattactaaagtccattaacataagaattacttctttcacatatctaaaaatatatcaagaaaacttagcaagcatcatgaaaatatgaattttaatgtagatagcattctggcacatgatatattttaaaaactatgagttctagaactataaactattttaaaatcaaagaagacagccacttatttaagtggacaacattgaatcgagaccacttacaatgtgaatacgttttgttcagtcaactatagttaatacttatgggatacatgatatatattaatctttggaagcaaaaaaaagttctttatagctgaaaatgttaaataccatgcagacagataatttgtcctctatgtaatgaaagagttagtgctgctttttaatttgaagaagcccatatatgctttattttataatgaactccagttttgaggcatgcagaaaatacctgtaaataaatgcatatcatgctatagatgtatattagtaaactaaggctagagtcaaaagcctattcattttagcctttcaaattttaaaagaattatagaaatgaagttttatgtttactatccaggaataaagaaacagaaatagtttaaatgacttcagtaaagattattctttccttcagtagaaatgagattgatttactgtgtcctttcattactttacaaagatttaaaagagaccattcttctagaggcagtttctaaatgcatttggtttaaagcactcaatgatgaatgaaaaggaaaatcaaggggtacatgaaataaaggtaatcaatcatgttatattagctaggagaaattcaaaattagaaaggcagtgctttagtctgagagggttcttttaaacattccctatagcctttaatatacatgatcctttaagaataaatatcgtcaccaggtacattcttcagttcatggtggctgctttataaagatttatccttttaggttatgaaaagtactgatgtgtagttttgagtgttgtttttcttagaaaagaactttaatagagcctacataaattagagttaatgataaatttaaagtggtcatgtaattttgactattttataaataatctttccacaagatgatactacagtggagtttccaatctggtcattttctaatacataagcttactagcattatcaaattaagatgaaaagctttctaatgttaaaatgaaccctgtacttcacctgtaagagtaatacattcatagtgtcaaatctgaatactaaaagtatacactttcatatcatttacttggtacacagacaattgttattagtaattatacatctttgtgttcctttttataataattattgctgatggcattggttgctaactgcttgggaatactagtttattctgactggaagaaagttcacctatcactgaaaatatatctcatttgaatctaaaaaataaattcacatagtcctggagactatttcaaaaaggttcatgtaaaccagttgataatctgccattaaaaataatcctctctaatcagtcacaatagtcagcacataccagctgatcagtatttgactttagactttttctttatctcttaacacaatcttgaatacttttcaagtctagaactagtctgtctttgggattattggtttagttattgcattcgctattggcatgggggaaatcttaaaatcagaacttcagttggagcttcattcttctttaacttttctattggaagatggttttggtggcttgaagaactcatgggtcctgctttggcaaactgaactgattagtctctgctgagaaatgtctttttatggtttggaacattttcagaaatgtggaacacccccccgccccgacttaacttcatagaagttcagtaaaatgcagtatatccttttctctctcatactttataattcacgaacacattgtgcaaattcgttatgataggcaatgaaggaaccacgtttcccaaattttatctccctgagaaaatgggaactatcaatcagagtgttggatgttgcttaggaaatatagaaattattttataattcagtctaacaattttagcatggatgaataataagagacaacttacttgaattagcaccagtttcttatctggtctacctcatagtgagttgctaatttcaggcctctttcctttgctatcatagaaagtttggtagtattaatacaagagaatctggctaatttgattatcaccattacatttgagtctaaggtcataataagagcctaaattcttactattgtacatcaacatatatttaaaaatctcattgtaagttggaaataaaaagtttgcagctaagaagcttcttgtttagaaataaaagttcaccattcaaacaagccattgaagtacatattaacctttgatgtatatttgagatttcaactgaataaattaggagctcacttttgccttccctaagtgagacaataaagtcaagtaaagtctagtttataagaaatcggtcttattttcataatctcaaaattataatctcctgactatatatatattacctataataagagctaatgaatcagtggcctgatcaattcaggtctttgcattacttctcacagttgcatggattttattggtgcttgggcttcagcatgttacatctcttgcatgactatataatgctattatttgaatttcaattactggtctagtgtatatttaaattgtttcaacacttttcttataacacttttgtttttaaaactagaatttgaaagtacttctcattacactgaaaatttctgttacacaaaatggcctttttaagaaattacttctgtaggatttttttaaactaagatattagtttaaatcttcttataatatttgtcctggcaaatggcaaagccaaagcttggtactaccattggaaaggtagtcatttattagaggcaagcaattaaaaggacacaagtggactatgaacaaacttttcaatacagtcaggaagcaggctatcaacacttgggctgttcttattgtgtctgttatcataattgacagcttgacgtaaaacgctatcacatgacttctgggtaggtatgtaagtggataagaggtcacttttcatgtatgctggcttgaaaggaaacacatttaaaggaagtttcagtcgaaataatggctatgcaaatgtttagctctttggctagttcttaaattcaaaaaatccttccattgtctgtcttttgtcattccctggtttgttcacttacctttactgggaatcaaagactaatatccagataagctgttctaattaatgtaaaagtaaaattacattttatgtaacgttaactttaatcaacagaaacacaaggaaaaaattatcttcttttctgaaaatattaacttagatctcagttgaatcagggaggtagagggaattctgaaggttttatttacagatattttagcattaaatattcttgaactgcacataagggacagggtaggaaaggaacaatgacaggcaactggtgtagtgggtgagaaccagggattaggagtcagaaggtttgggttttagtgttgatgtgacagggcatttctaaccttggacaagtccttaaaccttggaaaggaaaatgaagaggttgaactacataagctccaaagtcccttgaaaccttaaaatttacaagttgtagtagcctctaatttaaaaacaaaatctttcattttctaatacttatcttatgatttatggttaataatgtttattctgctcatggactatgcatactcatttaagttaattctacttctgctaattaaattaaatatcaagaaacatgggtttcagaaattggcactagaagtgacttttaagatatgaggatgatcttgagtatcttttttttttgtttgtttgtttttttttgcatgtgttgtatgtgaaacatacaacacaattttattctgaccatttttcttgttcataccattccttcagaggttacatgctattcatccagagaccatttaatttgctccatgtaggtaattaatattagcaataaaataaaattctcctaatccaaagtatgaatattggagtgttaatccttttaagcatctgttttccaccgcaaaaagagccttcaccccttaaaaatctgtttcattgagggtctggagaaatgaagaaacacaagaaaacataaaacatacctttcaagatgttctcctgagggccattgtaaacgtaaaaagaaaaaaaagtgagaaggtaaatttgcctgtgttgattgttctgttcacagtttaatggtttattggttcagttgagatttgttgtcatcgtaggaactgttagtacctcagcctgtttgctgagtctagcaaaatagaacattttgcttaccttctttcttttgttcccaaagctaattgctgtgtatttaacaaaagaccctgttaataacaaaggaggacccccatttgaataaacaaactattagtctgaagtcacaagcaatattaattctttatggctatctgctacttacatgattatttgagtgtagtttaggaaaggataatgatccaaatcttaggtgtttcccctttatgtagccatttgagaggaaccagatggcccctatcctttttctttttttctttgaagcaatctgatttgaactgggccaggaacaaggttctctttccagagaccacagaactccaccctaagaacatatgcagtgaaaacttcaccttcacatctttcttatttgtttaaactgttccaaccttccccctttactgatagcttttttggaagataatcttactttcttagttcaccttttatttggttttgaaattctgggcattttctagacaatagaatttcatattggtatgtgcatataaattaaaggattaaaatgatttatatgagtgtgcatttttgtaaggatatgcatatgatcagttctttttgagagtctatattgttacaaaaataagaattgttccccacctccacatgaaaacagacaattctaacagactgaatttctaaactgagtggcacttggtattttaaatttgattactattgggagaaaaaagcaatttcctatttcttaataaaaaatacttggaaaaattcttacagcattcttaaagctttgaacttagaaaaattctatataaatgaaaggcatgtatttatgtgccacttaaaattaaagttttaaaataaaaaaagagaatttacagctgaattacctaacactgattctgtcacaggacagaaactaaggaatcaccaccccaaactcaaaaaagattatcacctattatgttaaacttatttaaagcctaatgtaaaattattttttattaggaaaactgaattatgctaaaggcaagaatatgtaacatgaccccaaaagaagcttaaatacatgtagtattaaccttttaatatatagagtctgttcacaatttgcttggtcaggaatatcttggtcaaataagattagaaattgattttcttaggaattactatcatggaaatctttggtgaataagtgatttctattttaatgatttaattgcatcccccacccataccatcactttaaaatttcactttatcagggagttttgttagttccaagatgctttatgaccaagaaggtttattaattgaaaaaaaccaacatgaagagagaggctcttgctcaagtaacctggcttaagttatagcgtgtctcctcagaaagttcaagaaatgttgtaatggtagtgcacaatctaaacagataaattagtttcttatattttacatttttagtaactaaaaggaaattcaatgctaattaatatattgccaatttatttggcattaaattattgctaaatatatttgttgtttattttgaatgtacttaagcatatttttctgtttgggagaaaatatttctattgcatatatcttaaatagatgataatgaatagctgtagtcaggtttatccactttgggactacttttagaaaagaaaagtccaaaaatacgttcatttttatgtgtgcagcatatggtcaaagatagcccatttgacatttttgggggtcgtaaaacaaacaaacagacaaaatattagcaacattaacaacaaaaaaactaactcatttacaacacatccttctgaggagatgtggtcctacagttgtctgtgggacaataagcaatcagtgagtggtatttagattcccctggctttgtgaaagcatattatttttctgaaaacttctccaacctaagctgagagccccatagatactaatctgaagttaataattaacataattaatatgtactatgcctaaatatacatctcccctcttccaaatgtttgattcaaaactagcattttcaccagcctgggcaacatagcaagatcttatcgctacaatttttttttttttttaattagccaggcatggtggcacgaacctgtaattccagctactcaggagagtgaggtgggaggatcacttgatttctggaggttgaggctgcagtgaaccatgatcgtaccagtgaactccagcatgggccacagagggaaagcctgtctcaaaaaacaaacaaataaaaattaaacaaaacccttccattttcattgactagagtagaatcagtaagtgataaatcattaacattcttgttatacaaagccaagtttcttgaactgttttttgattgttttcattgtacttttaaaacttttacagtaaaaaaaactgtaaaaaaaaaacagaagacaatttgccccatcacactaaatttgattagacgacccattttgagaacttttaagaaatcttgccatattgcttcccgctagactgaacacatttacttctttgaaatattgaaagtatgtcatctgatttaaaacaaagcaaagtgtacttttttttccttcatgtgagtattttggtccattttaagagtatttatgaccaggcacccgtggctcacacctgtaatcccagcactttaggaggctgaggtgggcggatcactcaaggtcaggagttcgagaccagcctggccaacatggcaaaaccccatctctactaacaaaaattaactaggcatggtggcacactcctgtaatcccagctacttgggaagctgaggcaggagaattgcttgaacttgggaggtgaaggttgcagtgaactgagatggtgccactacattccagcctgggtgatgaagtgagactgtctcaaaaaaaaaaaaagaatatttatttttctttctaatttatttactgatttatgacttctttatgacatatatcctgagcagaatctacatgtctatcaatctgttgatctatctatgtatatgcagggaatttttttcagttctttaaatcataaaatcacttttacttgaaatcctgaaatatgcaaataactaaaacacgtggtttggaaattttagctagtatttttagagcctcatagatcgatagaaaaatgagcaaaaactatctttctaaaactcctgaatcactattacttagtgtgtgcagaagctcgatagtctaaaagggaaagtaaagattcttaatagcctatttctttggccacaacattatcagaaatgtttaaaatagtttatcataaattttaagtttatgataatttatggtactttggttccagtcatcatctggaaattctcactgaaaagcagcaaacaaggtttagtggattactgtgaagaagtcatcttttcaatgtaagatgctgttaatttacagtgtggccatctgaaggttaaaaacgatgattttctactgtgtttccccccccccaacccagataagtttactttcttaagaataaaaataagcaatatatcttttcaataaatctgctagcactgtagggcagctgttaaccaagcagagctggatagggttactcgaacaatctctgaagggcagagctgatgattcggagatctgggaagaatttgtttcagcttgtattcagtgcattcctcactttcttcagatgtagtaaagtattttaaatgccattactctgagtttaaaataaaactagaaatgcttatcaactctttctaaacaatgccagtttaagcaaaacaaaattagtaaaaggttaaaactgaagaccttgatgcttctaaacacaagttagggcgaatgtttgtaaggtgggccttttctcctctaaactgcatgtcttctgtgttttgcaaactgcatgcttaaagttattgattattttattcagtgcagattatttggtgtgatgcatagaaaaaaagcatttttattttctttctaaaatatatctctctattgaacattaacgtttgctttcattccagctcaatttgtgctctaataatggctaattgttatgttctaagcacttgtttctcttgtatgctttaattaatagagaagcatattgcaatagctttttctaaaaaagagtctaggaattttgcttttcaagaataagatttttttttgctttttttttttctttaagttgcctcttgggaaagtaaggttaatgccatgtacagtactagtttgcatgtgttcatttaaatactaaaaactgtagtactgctcgatccatatctgactgctaggtttcaattgacagctgaggatttgtgactggaccatgaatcaaaacggcaggcatttataccccagtaccagtgaggatacattgggaattacttggcaaaggtaacattttaattatttccaaccctacacttacacctaaaaattacatgagctatagtgtttgtttttaactagctttacagaaaatatatgttaaaaatttagttgttttggctatgccattcttctttccctgtcctcctcctttatttcttatgtaaatggaacgtcaaattaagttgggactatagtatatgcttactgatcattggaatttttaaatgctataaaatgttttctacaatttatactgtttttggtgggggagggggtggaatgtgacatttagattttaggacctgaaaagtgaaatcacagctttagtgaagatttttcagctacctgaggataaagcattggttttcacattgtaggtttttcttattttaactctttcctctactgctaattctaagccatttcactgttcatttttttcccctgttgtagggaaaaaaaatagcaaaaaattttggttagtcaatttaactgttattgacagcacccataaattttggagtaggaagattgttggaatcagtaactaaagaaggaatttgttaaagttttaatttctgtttgtatactgatgtgattcatggaagattgaccttatttggttggctgagaaaactattctaaaacttcattttcaaaaccagttctgatactgtttcatgcattgcctttagaaagtaagtatttcaaagtcagctgcgcttatgtattatttattttatttaagaacaaattgtgtcaaattgacaaattaaataattagattcatggtataatcataagtaataagaaataaaaattggcagaagagagtgaggtaatcccagaaggagttcaccagatagagttgacataattttccaaccctgctctgatgttaatcctccgtttacggaaagtgtctatagaaaggtacatactcagatagagttgtagatcgtctgcctatctccatattggttcacagaaactgctgaagagtagattttaaagaatcaaaataattaaatgtccactttaattcagataaaaattaaggaaataattcagattatgtttttaaaaacaatgactttttattaattcactaccatgtgacttttcttcttgaagattgatataacctccacttttaaaaggtatacatttttacatattgtgatttttttaacaagattgtattcatcctcccttttgaaaataatacaatatatgcttataaaaagaagataaactcaacgtaaccatcttatccaaatagccttaatgattaatagtcttaattaagtgaaagtatctcattaaaatattctgaattaatatacattttaaagtttatttaattgaatttaatgacctaatatttccatatgttatttaataaaaggtaattgaatttaataacctaatatttccatattttattgaataactctcttatatttcatgctctatcagttaacaaaatgactcatgtctgcgtacaagcttaccatatttataacaattgcaaaccagatgacgtgtactcatgtttgtaaatgcacctatagctatgcgaacttccaattctgtggaatattgattggcttactaaatctaaaaataggatagacctctaaagcatatttgtaagttgttagagatttaaaatgtaactttacctagttattagtaatgtttttgttttgagacggagtctcgctctgtcaaccaggctggagtgcagtggcgcaatctcggctcactgcaagctccgcctcccgggttcacgccattctcctgcctgcctcagccccctccgtagctgggactacaggcgcccgccaccacgcccggctaatttttttgtattttttagtagagacggggcttcactgtgttagccaggatggtctcgatctcctaacctcgtgatctgcccgcctcggcctcccaaagtgctgggattacaggcgtgagccaccgcgcccggccacagtaattttttaaataaaaacttgatagcccatggaaagagaagatgagtgggcaataaatctcagaacacatgtattggaggaaatgaatctgatgattaaactcagttcttagggcagtattgttgctgtcacaaatccccttcctggtgaaaaattgatgtggtaatcagtttcaggtcatagtaagtcagaaaaaaatacagaatttatttaggtaaaatgtttcttccctctcaaaaattgtaacttttcttttgattagtaggtaatggcatgtagaatggtcttaatgatcctaaaagctctttaaaaggtatcttggttttttttgtttttttgttttttattttttagatagtctcacttcctcacccaggctggagtgcagtggcacgatcttgtctcactgcaacctccgcttcccaggttcaagtgattcttaacgcctcagctaccagagtagctgggattacaggcgtgcactgccacgcccggctaacttttgtatttttagcacacactggatttcaccatgttggccaggctggtctggaactcctgacttaagtgatctgctcgccttggcctcccaaagtactgagattacaggcatgagccaccatgcccagccagtatcttggtttgtttcttctctttctatcctgattcagaaagcacataattgataatggcagccatcacatttctacattgaacagatattattgaatctttatggtgagctgtgctaaatgctgtggtgaatccaatgctgacagttcttaaaatctaggtgtgatgcagttcagaataaataaattcaaatgacataggttgctttgctttgttgtagttttcaaaaatggacacaacagagttcatatttgataatacaaatagcccttgtcggtggcatgatagctttatccatcttttttagtttatgacttgtggttatttttaaaacattgaaagaattttgaaaaaagtcataaatgtctgtaacactagcacttttaaggcagataatagacatctaaaatcttcagggcatggctatggctttagaatcatctgaataagttgaaaatatttaagaaatataggtctgttcatccaaagaattaaataatttgcctttgtcacgatggaataaataaaatatcacaggttatttttgttgtggtagatgccttttaacaaaaggcaatccctggagactgttgtagaaaaggacaaagcaaaacgggtgttttggttttgctttattttgattgattgttgtttgttgtcattactttctttgtacaatcacttttccatggtcaccctcttttctgctttatactaattgccctgttgaggtgtttccatgtcaaatgcagctcttgtcggaactgaaaatggcagtgccaagggagctgtgcaagtataatcaaagctggaagatttcctccatccacccgcaaccccaaggcttaagcattcccttaggaaccaaagctgactctttgggaaagttttcacagccttattaggttacaaccctgaagatgttttgttgttttgaccttaaaattttgtgaactgttttgtgaactgtgtgtgtgtgcacacacatgtgcaaaggagttgcttgcaccttgagagagtcaatttttctgcctaagtgaaaggtcaggaactgcagttaacccagagtaaaatattggttgggtgaagggctcacttctagtatagtcagaatgggctcaagatcttaggaggatgataggtgatgaactgcttaaggtaggtactgttgtgtttgtgctttgtctcatgtggacaaattaccttgttgcatatgtgagttatgtggacataaacatatacagcagttactccctgactggctggctttcttaaagtgatagtcagaatatagcctgtactgtcagatatgaaagatcaatataattgaatgaaaaagaaagctgaaggacaatccaagaataatacaaacataagctattttaaaacattagagggagtgctttatgcaaaagagaaactgaatttattgtttcattctctcttctctcccttcacccctttcaagaaaacgcaaagccacaagtgagtggttgtatgtgtctgatggcttatgtaaacatagaagaagtcttcagatggctaaaataaacatgcgcgtgttaccaaaggatatgtttacacaaaccatttgctcagcctctgaaataatgaataaatgaagattttactaaaataattgggaggatttttgtgtttctgcggatgccataattgaatggcaccaaagagacttttatcagctattttccgtgttacatgtgttagcagttcctttctgtgggttgaatacttcattctgtagttactttacacatgtttttctaagaaattgtcgtttattactgcaattctagagagttgcttgatttctcaagagaaatttagcagccagtaaaggttatttggatctggttggtcaggagagggagggcaaaaaaaaaaaaaaaaaagaaaaaagaaagaaagaaaaaaaaagtgtgggggggtaatagctctcattttatccatgtaacttaatttgcataacactcacctcagccattttccttgctttgttcataacattttctttgtaaaatgtatgctctcaaaagaatgaatatttaaacaaaaaataactttcaataatgggttgcaaaccatatgtttgtattacatatatgtgtttgtgtgtgtatgcatctatatgtgtgtgtgtatgtagtgtgtgtgtatatctccacatatatgtggcatacgtatgataagggcagtatgtccttaggtaatataaagagttaacttttatttcaacattacacttagaacatccccgcgaattcactaggttagcatttcctgctctcagtttgttatcttgacacataactacagtacaacagctgggttgttcctggagttcctggggggagctttattctccgagtgctgaatttccttttcagctgtcagctctaaagtgtgttcaaatcctcaactttttatacaccattctgggcccctagcaccactctgggactatgatagaaatgctgatatggtagatgaatggaagaatctttggttcaaggtggagaattgcaaaaaccaaaatttcacatgatcattgtttggtaaaggggctgctaactacttttgtctttgtatatgaatattctttttaaaggaattactctattctcatcaaaattatttgcacctgttatgaaatcaaaaataaaaacattaccattcttaaaaatgatcttgatatggttttcacggacgcacaacatctgtggtctggcttttgaataatatgttgggatttgtcgtagttttgcctaactttctccatttataaagaaagatttgtacaacacgacatttcctttttatctaggcaaactcttcagaacacttcctaagaaattaattgtattccagccagacttgcatgctgccatcccacaggaaatgggtcagcaatccattaagatgccattagataatctaatttggaacttaatctctaaattaaccatgctccatacttgaagcgtacttgagagaaagaaaaaaagtttacgtttgaatcgataggggagccgaagcgtgaagaaggctgtttgttttttctgtagctgtggtcacgtctcaagccgtctggtaaccaggagaaaccagacatgatgtaattccagattgaacttgaacttcagggacttaggttgggggaacaatggaccataggaatcaataatgtccattttccacatgattatgtttggagctttaagttaacctttatgggagaagcagcaggatctgcagtgtgaccaaaatgagatgatcctgagacaagatgttagaggaaagaaaacaacttttttccgtgatattttctgagcaggactgcagattccagcaggattagaaaagttcccgctctgcagtaaaccggtggcctgttcagagcactctttgttcgcttaggtaggacaaacttaatcttacgtttcctgtcgatgatttttggcagcgctactggagagggaggagcgtgattctgaaaattcccaaatgtaaaccttgctgattaaccctttgtagtgaaaggaagtatattaaacccctactttatttgaatatgttttatgtaaagtgccatatttacagatgtagttcgtccgtaagaaatcagttccctcgacagccagtgcaccatttattagcttacctttttggttctcatttttgctagtgctgttagtagggatatgatgatttttttagtcatatttacttaaataacaaagactatgaatgaataaatatcataataaacataataaatgataaaagaaatggcaaaatcttaaggtcaagtaattgaagaacacgaattttgaatattctgaaattgcagaaagttacaattattctctcttgctcactttgtttcacacacaggaagatcttttgcccatgtaagatcttttgcccttgtgaacagagtagcaagcatgatattaaaatgtgttcagttctttaatcatttgtaattttatgcttcagcattctgatacaagtaagtttcacctttaagaggtaaaattgtgcaaataatgctgatttttgcttttaactgaaaatcatttataaaagaatctctttttgctttgtataaaacttatatttctatttgatttagtatgccttgggtgattttctctagtgaaaggcactattttgaagcaccatttttgtagagaattttatctgctgttaaagcatcacatatgcaaataagaggagcagtaccacttttaacaatagcattgaaaagaagcccagggtagagaggaatacagacagaaagaggctggaaatcaacatgtgggcttctccactgtgctgtggtctgtgggaggagataaaataattgctctgagcctgataattgtataatttttaattggctaaaacctcccacagctacctgagttcttatatatgtatgcatgtgtgtactgtaatttatttataattagtcatcttcataataatttttcatctttcattttcagttctaaaatttgaaaaagatcaaacaatttttttataagtccttaatttggccaattgaggaagagcttttttcttatttatgtttaaaccgaacattttaaggaagtttttatttaagtgtaggttgctatatcgaaggcttcaagtattatgtaagagttttttactaaacgagtgcagtaattataaggaacacatttaatatttagtggcagtgctcccatatggagtggctttttcttgccctgtgctctttattagataaaatatttcaatggtagatgctattattttacttagaaagtgctagcactcacgcatggtaaagttaacattcaatccactgtgccctaagaacaaaaaacttctgaatcaattgaatataaattaatgaggtttgatgggctaccattttgatatgctattttcaaaaccgttggtccccaaggagtagcaataaagaaggctatttacctacttagttaagaaacaaatatgtttctctttcattactgtgaagtcctattgcttgcagttagaataattccatgagccacctgcagtttatgatatttggtgtttcccagagagcccacaagagtactttgcagttcaggtaagagctagccagggagctttctgatacagattattacaaatagtaataatcattaggaatcatcttgcatgcaaagaggatcattccgacggcaataatgatccctaaaaacggtgaaaataaatcgaagaaacccaagacctgtataaaacactttgtgtatttcacttccaggctagcctcatctgaagtggaactcaacaaacaaattattgacatacagccacatctgcacatatgtaagacaaaagcaaatactgcattcagctgaaaagcaactggaattggaggaataaagcacagttatttgtgctgaattttgggctcaagaattatacttccacaggaatttcattgtgatatgaacctcaattcacaaagtctcttgcataattcagtgataatataacttctagtccagtgagaaaagtaaactatgcttcacaggaaggggagatgagaaaagtttagtgggtagaaatacagatcctagaatgacattgctcgaattcaaatcctgccttctacaatttaatagcaatacgagttgggcaagacacttaacttcctcgcttcagtttcctcatctgtaaaatcaggataataatggtctttctcatagatttgttatgaggattaaaagttttaaggtaggtcaagcatgtagaacagtacctggcaaataatacacattatataagtgctagcaactggtatatttatcaagtactattttctttgttctaatacataaatagattcaacttaagtgtttgttccttctactggtctgagcgagcatttttttcacaagacgtaatctgcagcctttgtgttatattgaagtaagcaaccagtccgaatgcacccatgtacaacccagggcagcacagttttcccaacaggttttcagcaattaataaggagaactgtttattgtgcattttacaagaaatgctaatacttgtgtgttaatattttgccaataaaattagagtgtttagccaaggaagtaaaaacctttccatcttggggagatcaggaaatgttgcaaaggaactaaaggcaaatgcttcttttaaattaaaatacttattttatttattccccatgctttctgggccattgctcatttttattgccatctgtaaataatgtggctactgttacagttgaggtatgtattaatatgtacaactctttgtgcttttttcctgtaatattttttaagcttcttgaaagagtatttactatcttttaagtaaatatggtattttctcatgattaaaccagtatataaattctaaatggacaatactattgttcccctgaaaaatattcgtatactggatacttagacatttcataaactgtttaactagtgtgttatctcatccattatcaaatacacacaggctagtaataaatgatttttgccattcttaaaatagctcttattgtttcatcacctccaaataaataataggtgatgtaaagtctttgactttgtttggtttctggctcaatgtaatggcttcatacatgtttaatgtggcaccctgtggttcctaggtgttagtgagctaaaaggtaagggcccaattctttttggcctagaagacacactcccataatgcataattttaaaaaaacataaccagaaaatgttggtatggctgccgagagcaatttctgcctttctttcactgaaaggtatagctctttactctttgtaggtagatgcgaagatgaactattttgcccagtttatccaggataagacatatagaaatagtgcatctttttaaaaggaagaagtgggtatcttcttccgccttaatcctcacgctgtagaactcaccctagtagaacttcaactagatttgtttcagaggagatgaatacatagaatttcagatcatttgaccacttagaccagctacatattctgtgcactagtctctttcgcaacattagctaggttataatccagcttgtatggtgcatgaaaagttcactgtctcctgaagccaattaattttgccttcagaccactctgttcaaaagttctttcttatgttaagtcatctgacttcctgtgtaggcaatataatatagtgaaatggccagggaaatcagacagatctgagtcataactgagggctaagtgggagactttgggcaaggaacttaacttgcctcagtttcctcatatgtgaaacagagatactgatggccatctcatgagctcactgagaaaattaagtggtgtagcatatgtaaaacaccaaagatggtaccatgcttatagttaagtcctcagcatggctatcgtctggaagttttgcctttgtgctgttgctacaacctgaagcatgcttaagcggtctacattcctttccacatcaactgctatatcttccctgtctacccttagctgttctgcaatgacataatttggtgagtttttcaataagtaaatgccataaagttaggttttcttccacagtgctacctagaagaaatacagtacttcagaggtagtcttaccaataacaaaatgaagcaggaccatcaccagtaatgcatcttaagctctaaataattcatttgcttcttcccttttggggggagccatgtcatacatttggtcaaaatagcaagaaaatagtatccatgatatcaaacattttatttttggaattttgatttagctcttatgtattcattttataatgaactatctcattatatgcatagtaatagtcattaggatgagctgtactttgtgttaaggtactatcaaattcttttgtgtttttttctgcttgatttttttgcaaagtaattatatcttttcttttttaaatggttatatctactttatattttctaaagatgtgctttcaactttcagctatgctcatcttctctttgcctaaacaaatgtgatttggtaatgaaaaatttgattaaaacaaaggaaatgcacacttataaagatatattgctgaagtagctgaatttgagcttgaatattttgaaatcctttcagttatattctcatttcttttattggaatgcagatagttggaatgaacataagattatccatatagtaattctcactatgaattaaaactattaagcattttacatgtaactaatttgtttttgtgtgtttattttatccatacatgtgattattgatttttatatagagttagatgtataaaaagcactattacatttttacctgagtaagtatgcaattttagacattgcatttttgaaattaaataatctgtattactttaattaaatatatttatttacattgttatctcagtcattgaattagttttatcaagtttttttttttaacaggactaccaaaaatagctctaaaaaatgtctgtgccttatagttctgaacttaaattggcaataagagacttgtaaaactcatatatggggtctgcatagtgttaatgtttgagatttattttcccccaaaggttcataaacagtattgacaaatatattgcactctgcaattttgatatggtcataatgtaggatgggcggtttgaaagatttaaataaacatttaaattaaatttggtaggcattctgcagcaagagtcctgttagttactagcatcaatttatttttattgaacattttccaaagaataatgacatatgtctcttctaaagaactgagtaagagagctattgcaaaataaaccctgagttttctgccattagttggtagacttgtccatgtaaggagccacatctattttcaatcattaaaatatactttatatccctaaagcatgcaatctccaaatgactttcttgagctcacttaatttggcactcttgttaattttgcaaagcaatttgctgcttgttgacattgtattttactgtcaaggattatctgctttacctagtccttttgcttttggtacatgcttcttacttcaagttaaaaataatgtataaccatttttgtaatttattttatttgttaagaaatagcaccagctatgctcagactctataaagatagatgtgactaggtcgttttctctgtgaagttcacctttcagttagtaagataatcccagatagagatatttatgaagtaataaatgctgtaacaggaccatgtacaaagtgcagtggaaacacagttgagggtaaaataagtttcatgattcattatgtaacattgttcccaatcaatggtgcaaagcacaaaaataattgttgaagatgtgtgtgggaagataaatatgtgaaaacagttaagctgcttagtaaaagtttcaataacaagtattcttaagagttacgatttttcatcagattttgaggacgtgtctttttagtttgaatgtgattattcctgcttaatcaatttttgttaatgctaagtagatctaattttaaattcagagatacctattttctttttataggggatcaaatcacaacatattcatgagtatatgtaatcttgggtgacagcttttgaaaatatatagctgggtgtgatttgaaacaattaattgatttgtttgtctaaaaaggtattgagcatcttccatgtgctaggtactttactagagacggactttgctgtcattgagtttgtagtctaattataaaatcccttgagcacaaatggtcgttgtgatattgttttgaaatgttaactcagaaatatgtatgtgtagcaacaagcaacattttgtatcgaggtatcaccagagtaaaaacagtatgtatcaagttttaaaaaaaattcagaattgttcctttaggttgatattctgtaaaggtttttgtacttttggaattcaaatatgaacaaatgagcatatctagattgatagctacaacaatagtgctatctcacttcatggtttcaaaagtaaagcaaaggatgttcagtgaaatttaaaacctcgaaagtatgtttccatgctaggccatgactaatatgagtactgaattgtcagtttgatgttttcttggttcatgattatttatgcagctgttacttaactgacattcattcggatttgagtgttggaacaggcaatacattagattaagtgtacccaaaatgtgtgctgtagagttgtttcatgatatgtagatctgattttttttatcctccatatgatactttttaaagggagattatgctagtagcaattagagaattgttttccagtcttttttttttttttttaacagcctgtaattcagcataggcgaaagttgaactgatgagagtaaggctggaatcttatcatttactgcctccaacacccccaacccccaacccgccatctatcactccaaactcctcaagtgcagagcagctcaaatgtggtatcattactgatggggaggagcaggaaatgctcaggcttctgttgcaagccaatgtagggaaccatgaattggaaggaaaagctgtggctctctctaaaagtaagttaaagagggttagaataagaaaactgctggagagctatagaactaatcagtgcaagcagagacctttgtggcctcctgtaaatgtttttcctcacgatgggtattctgtagagaacaaaaaaagctgtgttccattttggttctatgattcttatttgttcggtctttactaaaaaactctgattaaggtatgtttgataattgggcatttcaaattgtatgttatgcatgggcctaccttaaacatgtagttttttttcctgttgtaaggagaaaagaaatatctttcaccgtacttttcaattgtattcaacccaataggcaggtaagaaattgaaacccatctgaccactgaattgcttgtgaattaaaggtaaaataagattagaatgtaactggcaaagtatattggtaccaacagattgctgcttttctttttcttttttttcctgtacaaaaaagaatgatattgcatttatattgattaatgtaaaatattttagaatatcctcaatcggttagaattcaataattgtttatatatcttactctggatttttctgcctcactttagtcttaattttcatttaaaaaatagactatagagtttagataggtgtaacatgtataatttggcacatttatctcatattagactgtaattttgaaaatagggatagcaataatttgatgcatctggaatttatatttctcatattgttgtagattttaacattgtatttttttcttttttcttccctccctgctgcctctctcctctcaacagtcctggtacctgggctagcttggttcctttccaagtgtcaaataggacacccatcttaccggccaatgtccaaaattacggtttgaacataattggagaacctttccttcaagcagaaacaagcaactgagggaaaaagaaacacaacaatagtttaagaaattttttttttaaataaaaaaaaaggaaaagaggaagactggacaaaacaacacaaaggcagaaaggaaagaaactgaagaaagaagataatagaccagcaattgcagcacttacaatcactaattcccttaaggttgaaactgtaatgacataaaaagggtcgatgatatttcactgatggtagatcgcagcccctgcaacgtagcctttgttacatgaagtccgctgggaaatagatgttctgtctctatgacaatatattttaactgactttctagatgccttaatatttgcatgataagctagttttattggtttagtattcttgttgtttacgcatggaatcactattcctggttatctcaccaacgaaggctaggaggcggcgtcagaggtgctgggtgacagagccatgagccagccattttataagcactctgatttctaaaagttaaaaaaaatatatgaaatctctgtagcctttagttatcagtacagatttattaaatttcggcccttaacccagccttttccagtgtgtaacccagtttgaaatcttaaaaaaagaaaaaatgaaaaaaaaaggaaaaaaagaaaaaaggaaaaaaacagtttgaacacaaaggctctatggaagaaatgcctctatgtaggtgaagtgttctctctgcatgcaacagtaaaaattaatataatattttccccacaaaagaaacacttaacagaggcaagtgcaatttataaatttatatctaaaggggaatcatgattataagtccttcagcccttggactctaaattgaggggattaaaaagaatttaaaataattttgaacgaatttattttcccctcagtttttgagggcattaaaaaggcattaaatcaagacaaatcatgtgcttgagaaaaataaaattaatgaaaacacagcacttatgttggtttagctgcagcctccttggaggtagaatttatttatttaaaattactggttgcatcaagaacccatagggtgtacaaaaggttctataaaatctgcattatagagacaaagaggcaggcaaatccatgtcacaagggtaaagcttacagtttacaaactgggaacgccagggtgtaggatataaaaacgcactcttgagaaaacaaatgtaatcagggtgctgaaaacttgcatggtgctttcagacattagccttgttcaacaaatttcttgtattgacagatccatagtgtgcatgggcagacacattttgcctctatgtctcttaaaattttaattaaaaatactctttccagtaatcctaatttgcacgaagatataatgtccacattacgtgccttgccttgaaatctaaaaaacaaaaaacaaaaaaaaaaaaacaaaaaaatacaacaaagtgacatcactacacttgttttgctgcatttattatcattttaaatctttaccatttttatgacaaaatattttgtactccagacgaagaaaaatgtgtgacatcatggattttttagacagttatacctttatctcacatttataaagcatatcatggctgtgtatagttgccgcttaaaaattgtaatcgaccagcaatattttcagtattttggtgtttttttctattaacctttcatgtttttcatcttccaattaatatttgggggggaggggtttcaaatttatacgaattatgcaataccaagttttgcctatgtaggtagtgcttttagctgtattggttattataggtaagtacacagatttaaaaaaaaaataatgtatgcttttttgtttgtttgtttgttttaattgaccaaagtgggtactgctatttttgcagtgtgatgaggtccttttgtgtactgagagatggacaggggattttttttaatatacatatatatatattctggggtgggtgggaggatttttaacactttgcagtgtagctgtgaagcagtgcaccctgagatgggcctgggctgcaaagcgactgttctgcctactgtgacaaacttcaacttacacaggttcccctctctaacttcccacctgggttgcaagctgaactcattactggttttcataacaacacaatagtaagaacaagcaaacacaacaaattctcctggaggcagacttggcttaaaaaggcagacttggcttggtgatagtttttcttgaaagttccagatccacagtggagagtgagcctgtctcatatttggcaaaaatatttgttgaaatgtccacataggggatgttggatgtttaacacttttgagagtttaacacatgaatattctttctcctagaaaacacattagacctgttggagggagtctcccgtattccttttctgccacttttcgtccccatttcatttcattaatgataggatatgatttacctgtgacttactacttcaaatggatggcagtgcacttggatttttttttaatatccagaagattgaacagagggttgctattgttgaatgtatttggactgatagattaaaatcaaagttcaatttttaaggaacaaaaaagtaaatcctgttttcattttatctccccttttaaaactgagaaccagagcagaagggaaatatagaattttaagcaattaatcttcctgtggatgaattaaacccattagatgctgatgggatttttttaaggaatggtaccttaactatatatttgatttcgtttcccctgagggctagaggctgaatggaggctggttttattttgcctttccctcaccgcccagtcccattgagtgtattcattactagaaggaaaatctttcagaattggtgacacatggtaggctgtcttaaggagtcccctggcccccttcccctaggccatggcctaataaaataaactgtcaattgttctcacagcatatcatttaataatgaatactttagaacaatgcttatgggctggagaattgtatttgattagcccattcagtttgatagcccaaatgctgaacagcacagcgggatcctagcagtgcaagttcaaaagtaagtccaatcatttctgtgatactcgccctggtagcaaacagatcatctcagccaagctcttcatgtatctttgacctattaggtgaacaaatgaacctcacaggacacacagtattttttaaaggcagactcgctctcttttttgccagtgagcagttctagctaaccaagttacacactgtgggtattcctgcctgcctcttgaatacaaaggcctagttcaagtgttgctttttttatttcaaatcaattttttcttctttcctttttgagataaaactattaaaagtactactatatatataaaatctcaaatcaacttttcggcctcctcctcgtgtaccaggaagtatattctgacgaagggccccacttttgcaggtcttgcacgcccctcccttacccagaactgcagagcttcaggatggcgaaggtcacccaagggcatgagtagggagtggtgtctccaaccatcagttccgtggcactgttcagcctttgtgtgctgccctgccacccaccactcacagtgcctctgaagcgtgttacccctggagtgacgtgagcatttgaggcttgtctaaggaaaaaaataaaaggcagtgaaggagactgtacataaagacatggcaaaaatcttaattatagcaatatagttatcgggtaatgttcgggtgggcagctccattaaaaaatatgtgaatgaatctgtgaagctgcaagtagcgagaagagcgaaaggtcttcttaatgaaccgcctaccttgtagacagtaatttgtacactgtatagttttgttaagaattttttttaaattaaaattcccatgtttgtaaagctaactttttaacaattataatggaactatatgttgtttccatttttaaagtaaacaagaatattccttgtttagagactggacttgagttaaaactctccagtctcttaagttatgtattaaaaagaaaatctgtccatgttaggagttatttcacagattcctgtgcttgaaaagcataggatactaatcctttaaaaaagtgtaaatggagaaaagttatattttatgaaggttattttgttgtatttagtattggaaaagttggtttccagagcatttcagaatgtcgaagcaccactgtctttttattagtatatacggcctttagcaaaagtttttgtgattgttacgtgatggtatttaaggttaagtttcacagagcattcaggataggcagaaaactaaaacagtgctatgtctcacataacgtgtcctcagggagcagaatcttggatttgtgacttgtagcttcataaggactcaacgaaagagattgcacagggacatcttcagcggtgtgacagcaggacatgttctttacctagattcaaattctatgtactgtgtgaaatgatgaaggctgcagaaagttatcccatattcagtgtacagtattcatttttaatgaaacaactctacaatattgctggcagataggccccaagcatgacattcaatatagtttacatgttcctgtcaaggtcttttgttaacattaaccagctgcatgctttctggactttaagaaattgggtttctatagaaaactttttttttttttttttttttaatgtgcaggctattcaagttcaatagtaaaagctcaaaaatgaatgttctactccatgctgaaggagctgaaagctgccttcttcatattttgcactttctggtagttcccctgttttttctaattccctaaaattgtgtgggtggagtggagccctgcagttggggggtaacatggaccactgattttgccctttgaccctgcacaatgacctttgcatcagccaaactcattgccatgacaactctttgtactgtgtccgtgccacagatctgttggtcacattgttaatagtaaaggggacaagttggagacggtcaatttttacattttttgttgcaattttttcttcaatggttgtaagtagtttttttttttttttaataataaaagggttcactagttaatactctagaaatatctgtgtgttgcaattcaaatgtatgttgagattgtgaaaagcgcttcagtgccactagcttaccggtacactagactaagcccttgatgacttattgcatgatacagtaccaggaacaacaggtggcctaaatacatgaaaagcagtgtaagctagtgacactaaagccagtcttgtattactgtatttttgacagaatggttttgaaaactgtgctacagggactgatgtggcaaatatatctctttatgcagaaggaagtctttttttttcttttttttttttttaagaagtatggctttttatgcatccttcatcgagggcattgaagttgcatggactgataaaagttgatgcaaaacaagaaagaaacaaacaaaaaaaaaaaaccagcaaaatgtttaccaaaaaactcaaacaaatgagcagtgcctgttcaatttcacagtctctgttgagttcagttgtaaatatgtttcaaatgacattttcttgggaaaaaaaatctctacaacattgtagaatgtgaggggtaactacatcccaggcataggtttctcaaagctgcagtagattatgtcttcatcaagctgttaatttgtgcttatatcatatagaacttttagcatcctgggaagagctgcccccacctcaatgatatttctctgagaacaacttttgtaggactgtgtgtttctttagatacatttagtacaactgtaggtgacgagtagtcagttattgcttgctagctacacaccagggttgatccattttaaaacttttggcattttgtcctcatgggccataaatacagaaccttgtattttaattaaatttttttacaaaaggaggcacatgcacaatctccatgtaacaaacctttagcagtaggatgtattatacgacagttacttaatttctagagttcaggcctctgggatcaaccccagactgggccagaatgttagtgaaggttttattgtgcccggttggaggataacgttctttgggtactttttgtgggttgcaaatgaactcaattgccacaagttttaaactggtgtaaatcaagcttgacttaatgtgattgttactgttatatccagcctatactgctagcagctgctcatactgcagtcaattactggaagcggatatatttcctatgcaaaaactgtttaaacaataaaatgagctatgctacagactctg

SEQ ID NO: 345 - DNA, 1760 bp, Homo sapiens
gacgccgccggcgggaagggtccgcgcgccatggctggccgctcgcgccctttcccaccgctgccgggaaaccgaggctcgccccaaacggatttgcgtgaaaccagcccaaggttccgggcccccccaaccgagccccgcgcccggggactgactcggggaccgactcagggacctcccgagcgccaggactcagggcccgacctgcagcggctgcaggcccagcgcccgcaagcggcctgggccgagcgccgtttccaggccctcgccaggtctttgaactgcagatcaagtgttgacagtcaccagtcaggaggagttcttaaagagttttatgttgactgaatattgcacattgagtccccattgagtccctggtgggaaaagtccacaatttcccattgatagctttttactgttgtgaaaaagggaagcgtcagccacacaaaagcctgcatgaccgctgcttcggagaagctctcgaccctaactgcagtcactgttacttggatcagatcaagcgcagtgactttttgggattcagtggttattctccacacttcgtagccatttcaaccaactctgagcacaaaatgcagccatcctctatgcagcaagccctgcccagtcagtgaccctactggacagatccaaggccagccctggttccctgctgcagccaccgtcctgacgttcatcggagcaggccggggcctggccttcccggcacaagtggctgttctgacaggcccccagtttgtcccatctgaactgctgggaggtttccgggtggccagaggagcaaagctgccttccaagtgcctgtctgtgcctgggagaacagagcaggagcgtcgtgcggtccaccgcgcaatgcatggcgattccaggcgctgaacaactcccctggacccttgggcctgcatctgactcccagctgcagagtcagaagctgagtccaggcaactgcttggccactcccgatcgctcctccctggacacccggttaccaaagtcagcaaagaagatgcggtaatcgccgcctgatctccacatggtgaacacaacactcccaccaacacctccttgactggtcggtcttcagcaccgggggtgggcaggcaggtgttctgtgttgacgagaattgcacaggctaaacacaaacacggaaccagagtgagaacacctcactcacggcagcccaggctgctccctaccaggtgacggagcgcgccggggctgtgggtgccaggggctgagtgctagggactcgtcatgagtggggatccccacgttcctgtcactgctgtcaaacagaaggtaaacagtcttatgaatgtatttccttaggaaaacttgtaaaaacttttattaggatatctatttaatactgaactttggcctactttgtgatagactataaacaaattgaggaaatcactatttctcacttctgtattttctcaaaaataattttgttacagagttcaatatactgtgtaccattgatcttctattgtgaaagcaaagaatttcatcaaaatattttaaattatgagtgaaaattgtgtatgttaattttgcagctataatattaatcaaatttcgtgtaattctaatcacaaaatgacgtgccttaagtgcccctccagctgtgggttggcagtgtccagacagggagggcccatcaccgaaatcctgaacgattactagaccaattctattaaaaacatttcaaggcaaaaaaaaaaaaaaaaaa

SEQ ID NO: 346 - DNA, 181934 bp, Homo sapiens
ccgatctggggggaatcagttgtttcttcaggtcttcgcaggattccagctcccccaactacctccgtcgccttctaaaactggcaggctctggacgttttgcatgctgaagaaaatcactgttttgcctccagcaaggaacataaatgttgcaacactgactcctcctctcatgaagaaagagtgaacaagtgcaccgagttgagcttcttctcacagagccaccgggctggggaccggggagcggaggctgaaatccccagacgccggttttctgggctgggctttctgccttactcactccttctccctctttctggattttaccgaccgttcgcgaaacagctttccacacaatggagcttcatgtcctcgtgcaggaagtactcatcgactgatgtggcagactttgctccctggcaaaagtgagtacccatggcgagctgaggccgcctccgacggcgcgcggcaggggctgcgcgggcggccgctctccgggatgcgggttcgaggcccgcgtgctgaaggggagagcggggccaccggcgcgggctcctggagagaacgccagccaggagccagagtcggcagccggcggggaagcccgggatccgcccgcctcccgcccggatgtcccttctcagaggggctaaaaaatactcttaaggtgctttgcctccaccactgcccccaaccccagcttttacaaactgcactcggctcgcattcgcctttgtcaaaggcatcttcacctgtatccttgagcatgagtttcggcgttgattgtgggattctcagaatgcaaattatttgcgtcaaaataaaaagaaaagaaaaaaagagcggggagggggaaggggcgcagacaggtgatgtgatgaaagccggactcgagactctcccatcagcagcagccgccgccgcagcagcctcgcgggcatccggcggggaaagtttagggttagcaatgctgacctgaaaggtgttgctcctcccaaaagtcagcgggggtaggggcagatgagcagcctccgggccagaagccggagctggacggaggcacctaggcagaggaattgcagcccgggaggaagctggaaggagagcccgctggagaagggaggagggaagggaagaggagttggttaaagtcaggcaaactcaggtaactggagggccggcccgagtgctacggcaggggaaggcaagggctggagttctggctctttgagtagaaaactatccttttagtgacctctacctgtatcctggggaagcaacccacactgccctgaaaacaagcaacgtaggggattctatgactggacttgaaaatggttgcaaaacattattattagtctggagggatcactttgtcttcatttgtcaagttgaccgggcaagatttcccacctgaaatcgtgcttcacttgaccagggaagtgctgctaatcccaatcctgaccatcagctgtgcaaacttgggcaagatacttaccctctctgggcttcgattttttttctgcaaagtttagggaattaattaattatatatatatattatagaaatatatataatatatatataaatgtttaatgaggtggaagtgctgaatagtgcaagagaggagcagatgaaaatattaatttcagtggttcttaaaaattaggggtgataggtccttttgagaattagctgtgagtcctcttcctggggcaaaatgcatatggcatgtacataaaattttacatgcaatccctgagggtttgtggatactccctgaaagccatgcctgaatcccaggtgacaatcccttattcctcctcctgtatcaagaccacccagccaactccttgctgctggttgggctgactgtgggagtaatccacagccttcttgggggtctggagtcagccacgctgctgaaggagacagctcccctgtcatgggtgagctccccacatgctctctccagagctctaccagcctctgactccaggggacccctcctcacaaccctttttaatgactctcctaaggcgacagtccttacccctagaattttcagtcccaccaaccctggagagccatctaaagaggatcgctgtctgaatcagagtgctcttcaggtcacctagctggatggcagggaggccaaggctttgtttggaaatgaagcagtctttgctccctgaggcatagtatgagtaggcagccatattcttttgaacctctgtactttgcctttagaggactaaggactcacatctctggggaccctgggtgttccactagcagtgccagcaaggcacatcagaaaacacacagggctttggagctcaacagactgggcttcagatcttgactcccacactgagcaagcctctgagttttcctgagcttcacttttcctgtcagcacaatgaaaataatgctgctttttttttttttttttttttgcatggttgttgggagaatggaaatactatgaatcatgcctagcccatagtcaatgataaactttttcttaatattaatgtggcaccataaataagtgttcaatagtctcatgcttttaagaacagcttactctctctctcctatggggcttacattagtagaagaatgagtaaaattagttctggtctagttatgcacaaaaaggagtggtggcctcagaatacagagtcagactggctgttcgaattgtgcagtgtcaaggagagcactatgtattgccggcaagtaaagtatgtccagaccggcgtggatacttgacctgtctctcagttctcttttgacccataatcttgagtacaaaacagctagtgctgtgcctgcagctaaaaacagccaggcatggaaagaagtgttgtggctgggtccatcttcagaaactgtagagagaaatatctccattgtcatctttcacagtttggcacagatgtagccaactcagcatgtactctctctccatggggtcctggtgcctccattgcaagtggtcagatgatgtagcaatgaaagaaggaaacatcggaaacttaaaaggaaattggatatccacagagtagccaaagatctatcagtatactttggtgaggtattcctgcatgcaaagatagcaatattcatgcctactatttactgagcctttaagatgtgctaagcactttcacacattgcctcaattaattctcatagcaagattgcagagtatgagttatcatttaaagctttaccagtaaagaaactgaaacatggaaatgtacatacaccccccaaccccacaccccacatccgcctagctcaggaaaggcagaaccaggatccaagcccaggtctgtctgactttggcacccactctttttccactacccagtgctcccaagctccccaatatcaggcacttgcatcagccaaccggattaagattcttctaaaaggcaggaatagccaaatctagtgggtgcttttaagtggtgtgaacatgtgcttggcttgtgatacatattaacgggtagcaacaacaagatcacctatgggaggataatattcctgacccttcccaagcccagccattagactcaagattggcaatatccaacattagcaggtgaggctggcgctctgtcactgacttccttggtaatccttttagttaaacagagctctggaatgttcattctctaccacctttagaatcagaacaccacttacctttacctccctgtgctgagcacgttttcattcatttattcgacaagcatttgctgagctctgttttgtgctgggcacttgatgacacagtggggaatgagacacacaggatcccagcccttgtggagcttctatgccagagagagtgacagaaaacagtcgggtgaacaaatacataaataaaatcatttcagatactgataaatgctatgaagaaaatagaggctgaaggctacagagggacagggcgtgggagcaactttcaacagggaagtcagagaagactgccatacaaaggatacccttgaacttaaacccgcattttcaaaaagggagccagccctgtgaaagtctagggaaagggctaccttagcagaactctcaagagaaagttcttaaattggagtaaatgaagcagtaaagcttaaagtctgaagatgggccctttagaagttgacttgtatatagggggaattattatttgaatgcctactgtactattctaagctgtgctgtatactctgtttatcttcccaatgatctggtgagttagctatttttgtttttattttacagttgaagaaaccaagagtcatcaaggttaaggagctagtccaaggttatggagctagtccaaggttatgaagctggtatttgaatcccttagtctatttcactccaaagcccacaactacttgctaacacagcatgtgggctttgagataatgtcttttggagaaagtaaggaagccgatagaaggagaatatcaaaagtaaattaagtagctgaatgctgacaacgatttgtatttgatgtcccaaattccagttagtgcacctacaactgaactgtccaatacagtagccactagccacatgtgcctattgagcacttgaaatgtggctatttcatattgagatgtactgtaaatgtacaacgcaccccagatttttaagacctagtattccccccaaaaagtaaactgtcttggccaggtgtggtggctcatgcctgtaatccaagcactttaggaggccgaggcgggtggattgcctgagctcaggaattcgagaccagcctggggaacacggtgaaaccccgtctctattaaaaatgcaaaaattaggcaggcatggtggtgggtgcctgtaatcccagctacttgggaggctgaggcaggaaagtctcttgaacccgggaggcggaggttgcagtgagccaagattgcgccattgcactccagcctgggtgaaagagtgagactccgtctcaaacaaaaacaaaaacaaaagtaaactgtctcaatttttatattgattgtgtgttgaaatgataatattttaggtatactagtttaaataaaatatattaaaattaatttaacctttttcctttaatgtggcttaatagaaatgtttaaattacatatgtgactcacatgatatttccgttgaatagcactgatctagactaataagttgacaaatacatgataggacctttttcccccttcttccaaacgtgacttcttcctctgttcttgtgtcaggctccttctcatctgcccccatattcagttatttggtgaagcacgagagaaaagaggtccctcttccttctcccccaccctcatgctgctggttagcaggtgatcatttgaagtccactataccatgtcactttgggatctgataaaatagactcagtgattatattcatcaccaagaccaatcctctcactcaggtaaatctcaagaggctttcaaacgtcctacaatgaaagggtcattttaaatctggatttaaagttttacctttaaatcacttcctagtacattgtctttgtagttttgggcactttgtaaaatcagacgaggagacaactagagcttcatgtttttgtgcaaagctcattaaataagtaatctcatgcagtaataaatgtttctccctgtcctcttgcttaaaacagcatgaacaaaaagtagtcccagttgccagaagggctactccaggggcatcacaaaagaccacctttggtttcttttgtccactagctaaagtggccctcaaatatgtcaatgaaataaagatataatttttttcctgcagtttcatttatttcaaaaaaaagagcagtcagattctggtattgctggagaaagcctctgaagagcaaagacctggattctgcttttgtgtactctactggtttgcatgttaccctctctctccctttttttcccccaactttctcccttacttcctgtagtaagtttggtgttgatgagataatgccacaaaaaatgctaatggtgaaatgtgctgtacaaattggccatggttatgattgataacctgaatacaaatggcatctctagacatgtgcctgcagggaggagttgcctttatgtagctggagcaaaacattatgtaagattctcttggaataacatttgttcatttccacttgaaatccaaatctgggggaaatggcagtaaagaagctgacaagaatgaatcttagtgtatctgtcactggtagactgagttctttctctagtctgtataggttccagagagagaacacccaattgaaaaaggacaagctggttttattcactggccagaaatggaaaatgagagacctcttgctctaaaaagtcaccttctccctagctgtgggaagctgcaggattgtgatgagttagatgtggggcggggagctatgtaaacacatgcagggagaaagtacagaggcacagacacagataaacatgtttctccatgcgtcctatggagagaaaatggcggcagttttcttctagggatggggagcccagcattgtaacgctatgttaatgacctaaacggaacaaggggtagccagttctggtttgcactggtttcctgcaggcctcttgtatttggcaaaggatcaccaagctcctgcgacatcccaggccatctggagttctttaagcaagagtatctatagataaagaaactagggaagataacaatttaagaaaataatgagctttcccagctatttctctagggctgccctggtaatatttctacatcaacagcaacacatatttttcagcattgtgtaagccaggaaatctatgctagactccacggggaaaatagaagaataaaacatggttcttgctctggaggagcatagttcctagttgggaaggtggacagaaacataaaagaccggtagcatgtaaagaacattttctaagtgttacataaatgatgcaaacaaagttttgcaattctggagggcagcatgcccataacctctaaggtatattaagaaagacaaagtagaaaatgggcattgagggctggaagcctaaagacacaaggagagaaggagagagccacctcacataagaaaaaatgcacagtggtgtggcagtggaaatgtacatgggttcgggggtgcgtgatgtggaaaagaacagttggcttaatccagtggctccagatctgagctttacatcagaatcacctgagaagcttttaaaaattacaaatgcctcagccccactccagagcttccatttaattagtttaagactggggactggtctcagtggtgtttctgattgattttgttttgtttttgtttctgtctcaatttcccagaatattctaatgtgaagtcagagttgagaatcactgagcaaaaaccaagatttttatatcataatcatgggacataaaatgaaagaagtaatcttttaaaggagattaaatggacaaccaagagtgtgacctttaatttgtagaaactgtatatacatgcacatttgtatgtagtcttttaaattcacagataattcctcgtggtgattctgtctacttggatgatgtggctgaaagcctttgtaaccagctgcctactcttgtcctctgtgtactttgggggtgtcctatagtggatcctagctaagtggggcacaatgggcatctcacaggagcttgtttctaccaggctttttgtaatcattgccaagggctttattatcatgcctaatagtgcccacagtagctattttataagcatctgcaatcttccctcacctctccaactttacaaattgagaaatggagtttaattacttgccttgggccaggagactagctggtgatgaaggtgaaatgagaattctcagggaggtgaaattagaatttccagctactgaattccacataccttattaaactcccaaagtgagtctacccactctcctgttggtgttagaatgttatttcttacatgaatgaatcagtgtcacagatcagtaggtgaagatgactggtttccctaagctgccaacactgtgattatctgagtgtcaatgacccataggcagtcacagtggtcccgagagccccgtccctgatgcctgggagctctcagtctagtgaagtttggccttgcatatttatagtttatccactctaacatctgggaagtgaagactctggttgctattccactgctcctagccccacactttacggctgttctgatttcccttctctgaagctcttgttcactgaaaggatatcagctttttgctacacccctgaaaaaaagaggagaaagcccagcattttaaacagctgctttttttttttcttttggatggagtcttgctctgtctccaggctggagtgcagtggcgcgatctcggctcaccgcaacctctgcctcccgggttcaagctagtctcctgcctcagcctcccgagtagctgggactacaggcacgcgccaccaagcccggctaatttttgtatttttagtagagatggggtttcaccatgttggccaggatggtctcgatctcttgacctcctgatctgcccgccttggcctcccaaagtgctgggattacaggcatgagccattgcacccggccaacagctacattttaaagaatcctttatatgtgttgggagcttctgggttcactgcccacggtgagactaggggtggggacggaagttcttctgaaggacagtgcggggaaaaagccagagtcttggcaatacagcctctttagacaaaaagataggtcaatttgtaccattcccaaatggttgggttttcttttctctgtctcaaaatccattactgatttaaaacaatttccaaaagctttagcaatagcaaaaagcaagcctcttaaacagtgttgctccacactgattgcacgtgagaatcacctagggagctttagaaacaactatagactcactgaatcaatattctgggaaggggcctggacattcgtatttatttacagttctccaggtttataatgtgcatccagggctaagagctactactggtcagctatgatccaaatcttaattacttatttgtatttcttcttttgccttgttttagagtctcatggcccagaaaaccatcaaactatatttttgttgagtagcaatttcatcattctgttctttaaaaaacatgattttgagcataatttaagtttgctacttctatagagagacctcacactcagtagcctcatcactaaaattttctgtgtgcaatttagaaatcacattgccagaagcttgctaattaattatgagactgaaagataaaggttaagctttcctgccacctatatattagatttcccaattgctatgttaatctttagttaaccaagacttgctttcttgtctcagccattttaaagccaattaactctgttcctgttcacacccttattaaaaatataattacagcagtagtctccagggactgtcattgggtaggctttaccaaggtaaattagccaagaaataactaggctgtgtaacaccctctcagaccctggaaatcattttggttgcagaagctacttagtatcagagtaggctggggtactcataaatttggatttggaaaaagccaattccaagtcatcctaaatgtggaagaatctgtgattttgagaatgattctggaatcagttatccagggtccagccaagtctgatacaccgatcctcagaaggttgtattaataacaaaaagaaaccaggtttttgtattagatttgatggaagaggctgggggacagaaggtgatgtagcattttgttttctggggtgctgagattgtgggattaggagaaaataagaaaaaagatcgcaggggagaacgatggacagaggcctcctgttagtcaactatcatgggcatcagaatttctttattcactcaactaatgtttatggaggttctgctttgttccaaggacccattataggagctggagatagaaggatgaagttcctactctagtgtagtttagattccagtaagaggaaacagatatccacactaaaaacaaacaataaataaaacccaataaattagtcagtactatgaaaaaaatgcaatgaactgaagggaatagagtttgctgaaggctgctttcaatagcttgtacaagttgcactgtctgaggaggtgcccttcaagctagcacatcagtactaaaaagaaaagcatgccgagagctggcagaaagaaggcttcaggcagaaagaacaacagcaaaagtcctaagactggaaaaggtctgagttgttcaggaaacagaaatgagaccattgtggctggacccgaggtaagaagcaatgagggaaaggtgggaaaagagcaaggagggcccgaggtcatgggatggagttaggctgttaagtgctttgagagcctaacatcctaactcattgggaggttttcagcagggtaggatcatggttggcattgcctttgagagctcttcccagcttctgtgtggagaatggcttgaagactgaaagcagagggtttgtaggaggctgatcggaagtacaagcaagaggggagggtggatcatgccaaggtgacagcaagcaaggtggaagaggtgttggattcaggatggaatttggaggtatggccagcatggctttcagatggaggggaccagcgaaagtgctggaaaacctagtcctgctcaagatgattgttcctgccctacccttgttttagaccccttgttttgaactaaaacagaataatatctagtgctatttaaaaacattaggaattttaaccttaacttgtttaagcagaacaaaacaaatccctgcctggggagaaacttctgtttgctgcttttgcctcttaaccataaaaatttcatcctgtctcgtaagactattctgatggcttttgttgtttttgattactgtgcttttcgtaagtgctggaaaggtcacattcgcattactagtttatctcttttctgagtgttttgacactttggctgtgtttaccaaggccttcctgctgtcagacatttacatggggctttctacagttgatcagtttctccatataagtgctaatataatcgcaagcatttagtgggcactgactgtatgcaaggccttgttttaagaatttcatgttttaactcatttagtccttccagccaccctttataataaaaagtgtgtactcttattatcattttatagatgaggaaactgaggcaaaaaaagaggttaagtcatatgcccaagatcatacagctggtaagtagtaaagccaggttttgaactgaatccatctgtacagctctgggttcctagtaactatgttgtgccacttttctatgtaattgaagctgccaccttcagaagtagacttgtttctcctgcaaaaaccccaaggtaccactaggagacactaaaactgggccgggcttccgggagttggactggtggggagatggcataatctagaggctgaatgatccaacccccctccaggaaggcctcacatctaaaccacctgccatctgccaaggtgggaggataaaccaccccccaccccgccgccaacagggcactggctggtgaaagttgccaataccagaggagtcttgatgaaatgccctctcttttcctcaaactctttctgcctactattcatagtttctgtgttgtacccacccacctgccacttatcaaagactgaagaaaccaaagttattcaacaagccatgaagcaaattctaattgctccccacggccatctgaggctggcctttggaaacttaaaaaaaaaaaattaaaaaaagagagtcatattaatttatttgttaccacattatttgctttaaaattctggtggcttctttccagtgttttattagtagaagcgaaataagcctaggaaacacaatatttcattctgtcttctctgcttttcactgcatatctaccttcaaaaatgtcttctctcaagttacttggtttctcaataactagcgtgaaagtaacagaccttccttccttcctaatgatagtaacaacaagggatttacagaattgaagtttatataaggaaatgcattaagattttaacttaagtaagtgaactattcagcaatggctataaagacagtaattgtgatgatttgtcttctatattatatgtttaaactagttatatattttaattatataagatgcaatttttttgctccagtttccatagggtaattttcaacagagattaacatgcgttcattggaagtgttgaatttacctaatcaaatcatcaatttgtttattcaactttaattttcaaaaaaatgttattttaaaatattatatgatatgtgtcaggtatttcttacggttgacttccaaatttaaaactgcaaagaaaacagaaatccatacatatagttgcagtaaactatactcaattttggaagattgcagtggcaacatcagtgaattaaagtttgaaagctatttcaaatctttgcatattctccaaataactcagaatcctacaaaaagctaaatatttaaaaaaatttatcttcaaaccaataatgtaagtttcttctttattgggatgattttggttaaatatttagcagaaagtaagggtgaatatatatttgatataggtatgtcctaagctaaaatcaagtcatttaaagatcagagcaattaatggcagttatgtgatcacaggaatcagtctatctcctccctcagggtttgattcaatgagttttatttttctcttagcaacttttcttattttacttttcaaaggacatcattgaaaccataatagtgttcatatctgtgacttttaaatttttatttatttttatgcatggtttaaaattcatttagttcatttaaaattcaaagatataaaagagcattcataaaaatgtccccctctcctgtcctccagcctttacaaaaatataccatatatattaatatgggctaaatacccttttaaagttatctcacacgcaagatgctatgactgtgtgaagccggagcctacagactattgctgatcccccagtagtagtagcagtgactctttagtggccctggagcttcctttctaaactcaagtgtatatttaatgtggctatttagggatgaacagcagtattttcagagaaaagtataaaagaacagatgaaatcacacaagatgcacacatctgggtattggtgggcatgtactttcagcagtgagtttacaaataatctagacagagttaagtatcaggtttaagagtcctaggatctaagcctgcatgggttcagtcttctgcaggaacttgggaatgttggggttcacttaggcccccagtgttggcatgtacacccactttcaggaggctggaggtataagttcctctctgcatttgtctcaggtcatcacaggcctcagaagtttctcaacagaaaaggattgcatgggttggatgtccagaaggatacgtggagttaaacatcagtcagtggagctagaggcttgctaagacttgggaagaggatgagggaaggcaaaacctgtcacctaaaggggaattctagaatgtacttactacactcatgacattaccctaccaccttcatttatcaccttgtgtcaaacatagacttcttggtcaagaccactatgctgtaagctacctgagggcaggactatgacttattctcctttgtttaccctgccccagtgcctaacagtgtctttggaattggaatgttcaataagtgggttaaacttttgaaactgaatatttcaaataatcacagataacagatggttaaaaaccaagtccttctcagcctaactagtgccaaaccaaatcattgtccatgtctcctaaagaaatgaaagttttctaattacctatataggtctggactcaaaactataaggcagcacactgtctttggtgttgacctatgtcccaggttgtccatggtcatcacacactaatgaccacttgtatgtatttcatctagaggatcacacagagtggtatgctaggcccaaggaataagtttacctgcttatttcacttctccactgtcatcctactgtgtttcaggaagaatttcttttacctctgcttactctactaagatgccccacataagcccccaactccttttcttgtccccctcccactttgttgtctattttcttctgtcagaccccttcctcctccaaactgaaccttcctgagaatataccaaagaactcaataaaccattcagcccactatagttcaataaatgagcacttggttcaacctcaagtctctgttggtggaaatgtcactgtgatctaggtgagggaaacattttgagagcctgtgggaacctccaatagcaccttatagtagcttcttctggtgcctgtgtaatactacaatttccagaagccttgttgatatccagctaagtgaaaagaaagtcctcagttccagagttcttacttctatttcttttttttttcttttcccttttgtttttttttgagacagagtctttttctgtcacccaggctgcagtgcagtggcgcaatctcggctcactgcaacctctgcctcctgcgttcaagcgattctcttgcctcagcctcctgagtagctggaacagatgtgcgtcaccaagcccagctaatttttttttttttttttttttttttagtagagacaggatttcaccatgttgaccaagctggtctcgaactcctgcctatccacctgcctcagcctcccaaagtgctgcaattacaggcatgcgccaccgtgcccggcccttacttctatttctaaatagcaatggattccactcttccaaggacccagaacttgccctaggggtgagggtcttttgtacatcttgcaactgagaacttttgctagaatcagacagacaacatagatctcagctctaattttccaggagtgaagctgtggagcaagtgagttacctctctgtctcactttttcatctgtacaatgaggctactaaaacatacattccagggttgctgggagaaaaagacaagacaaggtatgtacaacacttggcaccaaggaagcacacaattcatgggagtaattactatcatcctcaccaagagttcatgatttactgggggacaccaacacatgtacagtcaacagggtaaaatgctaaggatgtggggcaagtgttgagtctgagctcagtagaaatttatgagcctcaaaggccctaaaacatccttgaccactcagttctatttcacacccttcttgtacttcaccaacaaaccagcaacatgcttctggttggcagcccttataaaagaatttaccttctatagtcaagtccaaagctcttaactgcttaccacatgacagccaataagacaagatattggggcaaggaagatgactttttttcagggagccagcaatcctagaagatggcagactgatgtactaaagaaccatcttaagttgatagattgttaggctccttttatgttaggggaagggggaataggtagggggttaaggtccacagttgactggtgaccacaggcatctgggcatcagcagggatctaggaggttgcaaaacttctttgttcatggtcaactattttccagattgaccttgtttctataaatttttaagatggcattgttatttgtgtgcatactttctaatctcctcaggggtctgtttcaaaagagagatggtcattagttctgaagttaaactataatctaaattctttccatcattagcttggcctatgtataggaatgagcaaaggcagttagcctgtgaggttagaagcaagatggagtcagctatgtgatatttctcccactgttacacatctctgaatacaagaggaatacatttcttctttttgctgtgtttgcttcaagcctgtaccactgagaaattgggtgatccagggaagttttacttctcttgaacctcaggctctatctttgtaacaatggagaaatcaatgcctgcattctaggcccttttgagggtggaggaagacaatggttgagaaacttctcatctatagttgatcctcaatgcgtttgccccttttcctgtggcactgctttgtatttggatggttcgagcagtgcgtaacacatggaggaaaggcaatggaatgatgacaaatagtttgttgatttggtgctttgtacattcacccacaaatggcacagtttcagggccactgtccttgccaaatactatctgaagagctaggttatgagcctttggaacccagatctgataagcatggaggaaaactcctcaagggagatgaagctaggagattagcagaatatactttctccatttgtcccacatttgatgccagcaggcaaaccagagccagctgggcagtgtacaattcccagaaataaggaaagggtagaagcacctgtttttcctctagcaaaaccaaggcaaatggaaaagctcagaaatatatcagcaccattagcaagaggcacaacggggaaggctggaaatgtgctgaggaaaatcacattgccggtcaacgcatagctacctgctggagaagagagtctgcagacacacctcagcctggacaaaggcctccaggaccgggagctgtgctctgcaggaactgggccccaggcactgaggactgaaaaccagcccaacaaagcatacctgtttccatttgtgagagatgaaatgatatgggttttgtgactcactaaaccacttggaaggccaaacaattacaaaagcaagatgcctggcttcttctagccacatggaggggccctcagacttgagtagctgtgtgccacttgtctggggtggctgcaccaaaaggaacagtgaggtttagatgcttgttattgttcattgttcagttttggttctgtctatttacttctaattcctcaaatattattgtgattagtggtatagaaaggaaacgttcatttgtgagcaaagtgtgtaataagaatttaataatgaaattcccagaaaaaaaaactcagatagctaaagaaacagcagtaacatgagctccaaatatcttgagttgtattgttaaggtgagaatccataatgtaaagggaataatgtaaagggaatgctttgaaatcaaaggcataatccaagtgtgataacctaaaaggttgtggatttcttttaaagtagaaattacatgtggctttgggaaatcatcagctgaagcataagctatgcttatggattctcgctgtgttgtcactaagaccgattatataaagacttggcaaatccatgtacaaatgtaaaacttcccacaatggtatttcatggggatctccttttacaaagtggtcgttgatcaggacatttttcactgatatattcctttggaagcaatgaattttagataggatatgattattgtacaatgtgataggtagctctgattattcaagcagctagggcattattcagtggcaaagcattaagctactctggaatctttcttctgtgtaagcaggcagctgctgttgagactttctctttgtgggtgaatttgcccaaccaatggcaagcattcattgggagtaggggaatgacgctgatcactgttaatgacagttgaaaatgaaatgctttaatgaatctcatacttggacttggctgctgagccagagccctgtacttgaagagcttaattatgatgcctcaaaatttagatcttgaccctgaactgctatgacttcctcccaccctcagttttgagagaaactttaaattcgctaggggattcaatgttttacatgcttggttatgcaaaatgggaacagtagtgtccaaacaatggaataggcttctatattattattttcatttaggcagtataactgacatgattaccaaagtcatgttatagtacatgtatacaaattaatttcataccaggggacttcactggggggaaaaaagggaagtccctatttgtgaaaactatgattttggtttctttctgagtaaagcactgctaatctctttggtgtacaggaaagtatggtattatgttctaaaaatcagaagccccagaccttaatttcaactaatctgatgacatcattttgtactcagagtttcatttcccaacaatttcatgtttcttagtaggtggggaacccagaattgaaaggcatcaaaaacagctaaatataaccaaaaacctgctaactcaccagctttctaaaattcaggaagtatctttaacttgattgctgaatctccaaagacatgatgatcagatgactggttaatgggtattttttcagactctacatgattatcagaaatggctgccctggccaattgtatacctacgaagaggtattatgtagaagaacttatattcatctacttaatgtggacctcaaatattaaggatgttcctaatgtgttctagaccggagtcagcaatacttttcataaagagccagatagtaaatatttctaggctttttgggccatatagcctctgtcacaattcctcaactctgctcttgtcacacaaaagcagccatagacaatgcataggtgaatgaatgtggctgtgtttcaataaaactagactctcttaatgccaagtatttgctggaataacacaaattaatttatcctcaaatctgtttaacctattaatatgtcagtcaatattacattaatattttatgaatctggtatcatattatacatgaatttatctgaacatttggttaattcatgaatatttactcaatattaatactacatcatgaatctgttatcaagtcatatacagatttcttaaaaaatttcccttatttagcgtacttgtgaataacatcaataagcaagtatcttaagttaactatcaggttatatagcagatcctctcccccttttgtaactctttctgttacaagggattttacattattatggtattgggaagtaagtctatttatcctgtccctatctgtcttcgtattaaccatattctgttatagcttttatctttgcagacagaatagttcaaatcttcatgatttgtccttaaacaacccccacttcctcatcctcttgaacattttatgcctccatcactgtctcttcaggtcttgtgagtccttgaagtgcagtgactaggctggaacatggtgttccaggttggtcacatcacctcttcctaatgatgccccattgtaccttttgactatagcaaggaataaacaaagtcagaagtgtgaaagtgggggagaaattgagaaagtgcaggggatttaggggagagaaaaatggactacaggaaaagaaaacattgacttttgcaaagtgctctaaactggctacaaatgcattccgtaattctttaaaccttaattgtaaccgcagttaagctttccggtgtgttggaataagaacaaaactaaaatccttctttgtatagaaattatcctgcagtaacttagagccaatatctctagttaggatgagcgcagtggctcatgcctgtagtcccagcactttgggaggctgaggcaggtggattgcttgcacccaagtagtttgagaccagcctgggcaacatagcgaaatgctgtctctacaaaaaaattaaaaaattagacgagcatggtgtcacgcacctgttgtcctagctacttgggggcactgaggggagagaatcacttgaacctgtaaggtcaaggctgcagtgagtcataatcacgccactgcactccagcctggataacagagttagacctgtctcaaaaaaaaagaggaagagatctctggttagagtttgtctctgatggatactaaccatgcaagtagtttacacaaaccacattctttctgtagaatgagaaaatcttggatataatttagcataatgagctaaataactctagactgagcttcgctgcccagacaggactctacttgtgatctgggaagatctacccttgcactgaattctctcctcttctctcctgactctgtgagaaaagtttgcatgaatttactgagattagttatagaaggaactgtgtgtcattgaaagtcttgtacagaagttcacattaaaatatatcatagtcatctttgggaatgattctgcaaaattcataaaacaaagatctctgaaaccctaaggcacactgtgctggaggctaagggaataatagtgagctgagtggtttctgcctacacagagcttctaatatattgaggaaagagatctcaatcaaattcaattgcatttataagtatggtaaggacaacaaaggagagagacattattctgtaggagaataaccctgtcaaagtgatgactgatttaagatcaaaatgggaaggtaaaattttctcagtacctgcaaaggcactgaggtgggagggagcatgccaatgtagggaaatgaagaaacccagtgtgtatgagccaagctgaataaaacatgagaagaagctggagaatgagagagaccagtccccaagctctcaaggagcaagaggaagccttttcggcatttgaagtggagggatggcatgatctcgtgcgtagtttttaaaagaaccactcaggctactcttttgagaatattgtgggaggccagagtagatgcctatagacttatacagaggttaaggcagttgataagagtataaacaatgatggtagcttacctcacatgctttttagattataggctagaaggtggcccaagcccatataccatcatggcacagtgaatacgttttccttctggatcgtggaaatgaatattgtgccacacagcttgattgacactccccaatgacttttaatactgtgggatctctggcacatacttcagaagatgagaaaggagttttaattaacctctgtttaggaattccatagacataattttcattaacatctacttggtatttcatctccatgaattctttccagtgataaagctagttggtttatcctccaggactgctcagttctgaacagtgggtcttaagtactctttggatttctttgaaggcttttttttatttttgttgactacctctctactcattttgccccagaaaaaatgtagtcatttctttgataagtgaaatctaagaaaggcttatttcatttggtacattaaagagatggaagaaagtaactttacataagaatataaatgccagctgtccagcatattacagaatagatttctaaatttgctgaaaggttaggaaaatggattcttatgtaggcttaaaatttttataatttttttggcattctagaatgaaataaagaaaatcggtatcatcttgatctcatcacccagaagaaaaaaaaaacactgatacatggtgaaatattttcctctctcatttttaaaaagaatcaggaatagattgtatacatatttttcaaattctttctacttagtgttatatgatagtcaataatatatgtgtatgtaagtagcaataaatcattcctgaaaacttgttttttaagcttgtataacattccgtcatatggatgtactgattttgctaatttgttaagtttaaaataatattcattttcatttctttgactactaggtataattaattttttcatacactcactacccttcatacttcttttattgatttcctttttatgttaattattaagatttctatttgactctcaacattttcttaatttttttatcattaatagatgtaaaaaaattcttaatttttaaaaaataaacccttttcatcttaaagatagcaatctattttccataatacttgttataaatatttccccagtttgatgttggtcttttaattttgtttaaagtatttttgacaaataaataagtttttgtggcttgaagtttgttcatttttttcatttgtgattacagtttagttgttgattcaacacatccttattgagtgttttgtgttcagcactaagcgagacacaagaggtaagacagaaaaacaaggtgcaggtggttttgccacttagagattacaatttaatgaggggatagacaaacaaaaccaggtcattataaaatagtatactacaagctatgcaagaggaaatacaggtgggaagaagtacctgatctggacctgggggataagggaaggcttctggaaggaaacaaccttctagctgagaatgaaggaaaatggcaacatgaatttagagagaggaaacagtatgtgtgaaagtgttgttcagtgtcctaaatgttaaaggtcctctttccccagaacatggagtgtgtgtgtgtgtgtgtgtgtgtgtgcgcgcgcgtgggtgtgtgaaggagcagggcagggtggtggtcaagtgtgagcaggaggccactggggaggctgcggcagtccgagagaaagacaatgatgttgggcagaggatgtgttgaataactcatcccttttcactggacaagcaatgcttcagtgtatattaagttcttattcatagcataccgtctattccagaataatctaattagttttattgctatatcaattcttgggccaacaccacactggttttgagtttaatgaaacgtctaaactggtaatgcatgcatcctctcatcacttttcattttcaaaattgatttacctattcttgccaatgcgtcctcccaagtaaactctaaaataatttcaaaagtcacaaaagcatacgtgtgtgtatatgcatgtgtgtaaatacatgtatatatgtgtatgtgtgtttcttccaaccatttttcagtttttggagaataagatgtttttattcaagttgctgtcagtaaatattttatattacatgacttctctatacacacacacacacacacacacacacacaatctcccattggtaatttgattgggaatgtgttaaatcaggagaacagacattctttttaatattgagtcagcccatcaagaagcattgaatgttttcccacttactcaattcttttatacttctttttaagcctttatagtcttactcatataggtcctgcatatttattgacggggtattcttttttcttttataattttagcttttaattatgaatggatttttcttccattatctcctctctggtattactggactacaggataaatattaatgatgtatatttactttttatctgattatttaactgattataattaattataagtgttcatagttaattataaaagtttataatcatggtgtctttaaataatgataattgttctccttccaaaaattgcatctaatttttatttggtgtcttacagcattgatcgtaacttctaatactaaataacaatgataatagtgagcgtcctgtcttaatatcaatttcaagaagaacacctcttacataacatttttaaaagtgtgttatgtggaagctaataaaataaacttgggaaatgcgacaaatgaaaattctctctcccaggcattcttaattcatattaacatattaagatgagatctgcaacaaagagatgagttcaactgagtttaacccagtatttctaaaatgtatttgactatggaagtatttttccctcatttagaattttacatcagttatgacagtcaaaattatattaatttgatcttctttctttttttagaaaaataattttcatactttcttgtcttttctgtttgatctctcttttgccatatggactatgatttgggtttacttttaatttttttcaataattgagaagctcgtcacccttctttttatttctacaagtggttacacttaaagtttccaagacatttctatccatatcttatacttagcaaagtcaaagacatgaccatacagttttctaatcaacttcaaaatgaaatgttatctttgaataaccccatcaaaagaaatttaatccatttttacttccttccaacctttcctcagtattggtaagaataatttaacattttttattcatgttactgtcagtaaatattttatattatatgacttctcttttgtgaattatgtgatctgttcagcaacataatcctttacaatacattcctgagcagttctatggttatctgatttctgtgtccataactattgtctttttataccataaatttctcatttttttactttttaattttaatatcttaagattcgccaccttttatcccatttatccttttagggtgtataatgtaggtcatctacattttgagaagtgcctgattctgtttactatagtgtcagttttaccccttactgccttcagtggacaaattagtactattatttcatttctggctcctctacaaccccttttaatctaacccagcactcttttccttccttacttttatctcataatggctacctgtccttttccacagtattttctatttcagttgaagatgataaacagttttctgacattgacattaagatgatgtttcagttttcttgttagacaattttgttcactgtctaagctacttatttttcatgattactcgtctaggaataaaaatcaatctacttagacccaatatttttgaacactgagcatatgtaatgtgttcttaaacctgttcaatatgtactgggctctaaatgtcctggcctacagctggagggcagaatgacatgtcctagttcaatatcagcctctaacaggaatgctactgatgtagttttctgcactgagataggatcttcttttcttccattgcctattctcctggaggcaaaatagagaacataaaaagtcatcatctttggtatgttcttctttaggggctttttctttctcccagcccaacccccatagtccttacttgctagatgtgtgttccaggattcagttcaccactgcccagtcttctaacatccaatttcattgttttctgagagttgagaattttcatacagatatagaagggatgctgtgcttgtttgaaatggttctatttggcagaggatagccgaacagtttttaggcaaagaatgaactgtctacttactttctttgaagaagccaacaatttggttttgttgccaacagcaaataatatattggctaataattgtggtttacagtgacatgggtaatgttagtcataacatgtcttccaagtttctggctatggactaactgtaggtcttggagtttggtattatctagaattttccttctccctcctcccccacctcttatcttttagcatagttgaagattggaacttcttcccagaaatctagcatcttcataagtcctttccggttttaagatttttatcttatattttatatatatattacatatatttcctgtgaatcttggctgaatttctcatttaataaagtccaagttagtatgaataaataacatgtttcccgattttacacacatacagaaattcaaacacataatgaactctctggcagcctttagcatttgtaagtgctctctcaccaggaaaatcctttaatagataaccaagtgtcctggggaagaagggtgtcaggaaacttattatatttgtgtcactttcttcaaagggtgattaagtatatgtctccaaagatgtgatgttatcatctttgagtatcacttgaattcaagtcaatatttattgagaccccatgttgtatcaggtgccttactagaaagtcgacatatagagatgcataagacatgatctttttcagtgggtaatttaaggtctttcttctactgctagcattgtcatgtgtaaggctggtgggttgagtctttggaatttgtgaagattcttccaggttgtttaaaaaatcttttgattctcacaaatgtattttttctatttcttagaattatgttctttatggctaccaggaaatcctttgaaactggaattagattgcattattccactggggtaataggattggtaaggtaggagtgtctttgaagaataatgctaaataacccagacactaaggctgaatcttcagcacagctcttaaggcatcctgtaagtaccctctgctgcttattagaaatcccaaagccctgctcccttaggaaagcggcccatccccatcctcatcataagatgcaaggcatagctaaacatctcaacttctcacttgagtattatatactctcaggccaggatactttccaactcaagagtaagataacattacattctgatcttcttgtgtgtgtttttatgttttttttttcattttatttattatttttttttttgagacagaaattttactcttgtcacccaggctggaatacaacggcgcaacattctgatcttcttttgagagaaaagtttcacacaattagcctttgaaatacacattcctttaagtaccatgaaaacattgtcccatacaacaatatttctaagaaacacacatgtccctcccacaatgattttttcttgttaccaccaataaaaattagagctgtgttgtttttgttgttgggtttgtttttgtttttgttttttggtgactactgtgaccctcaaaaaatcaatccgactttctcgatcttgatttgcaacaccaaggttaccaaacaaagagaatggttcaatgagggaaagctcaactacctaaatatttagtatagcaatgctgagcttttggtaatggctcaaaattctcatgctttcccactaaatgaaaaggggagctttgctactagtaaaccatattcaagaaataattcttattaatactttgcttctttcctatgaattattgctttgtaatggatgtttgacaagttactagcaaagcagtcttcgatgagcacagagacccatcagatctgtattaacacctccaaccactggagtttcattaagtaggtttctctacccctctccttcaggccacagataggaagaatgacattgggtccaaagttctggcacaaagaatgatgtctgccttcctgtgatgatttcaaattcagggtaataattccaactatctttccctggccatgatagaaagctcaagaaatcttggttccttgtctcttttcttccatccagttggtctttctaattacacactcaacacaatgttctgctgagcaagacatctgctgtagccactatcacccttggcataaccagatatttaaaggtacctaaaggagtttagccatattttgccaagatcctaagttctatggcataagaatccatccacttctctactgcctatagaaaaggacagctcagtctttctgaaagaattgttctcaaacaagaaagcatttgaggtaacatgtcaacaaggtggactggtaattggtgttcctttcagagccagttggaggaaatggccagctcagacattctcttctccccagtgtcctatgggaacaagatttacccagacacagctgactatgagaagtcttcagggatttacaacctgtctaagaacaaggccaatggggggctcactttgcaacacgtccctatttgattgtcagaggacagatactctattaacaaaggaatttgcactggtattttcagggacacatcaagtaattgccacttgaacgtttttccaggctttcaaaggaatgtaagaatggcctaaggctaaattacattcatgtctttagtgagtcattatattactggcaataaagtatattattactttactttcagatgccctcacatatttttttaaagtagaaaggagacatattatggtcaccattcttaagagacttaactaaaagacactaatttaatcttttagttacttaaaaatagctgttgctcacccactatgtgccagtctgtataccaggcaccaatatgaaaaggtgagtattctctggtctccctaagcacagtctagtggaggagacagacaaaatgcagccatggccagaagggggagcagttaatgaacaagtaggcagagagtagggaggggattctgagagacagtacggacggactgagggtaagttgtacatccctgatattttgggcaattgcaaatagtttgatgaccaaatcacaaggagaagaagtgacagcaagcatggctgaaaatgtaggttggtgtcaaattgtaaaaagccttgaatactgtgctgaacggtttgatccgtgaatcaggtagaggacttgactcaggtctcttgactcaaaggtcatgttttttctctgctagattgcacttatccttccaaatgctagtggacaccacactgaatttgatcaaagatctctcaatggaaatatgtaaatttcctgtaagaagcaattggtaggttctcttattatcatctccatctcacagataaggaaactgaagtataaagaacttgagtaacttgtccaaggtcacacagctagttaggtgatcccagacaatttggctccagagtcactagtcctaactacaacaatttagcctctctttatctagaggtctttatgcatttgtctgcattctacttacgttggtattggtgagtaaagattcccttccagaataggtttgataaattgccaagtctgaaactgaaaaattaatatccatgataacagaggttttggggtcaaggagtgaaaggaattcatcccatcctgtctctaaatacttttttctttaccaatttatgggaatttgagaccagatatctggaaccaagcagcctcaccctattaagggaaagaaaaagaacagaagaaaagaggagaggagaagagaagagaagagaactaaaagtatctgcaaaaatattaaaggatttgaccgagatctctgagatgctccaaagattgcaattgtgcttactatccaagttaatggctgtaaatctaagagaattatgatgtgcctggtaaatattggttgttttgttttaagtcttcatggagaaaatggaaaagacattggcatgtaggatgaagtcacagcaggacagacaggtcctgcaagtgtttctttagatgcattgatattcataacatccaaacaggccttaaggctgtcttcttactttacacttaccaaaggggtaaaatatcattttccttggacacacaaataataaacgtactctcacaacatcacttgaatgttgtggttttgcaaatatactatgttttaaaagctatagccctcaaatcccttactagacatcaatatttgttggaatttcaacatcaaagatttattgtgaagggggagggggaggagttactccaaaggctagaaccagtgcatataccataataacaactctgcatgcattattgcttctaatcttcataattttgagtactatctttattgtcaccatttaatgaagatgttaaggttctgggggcttaagtgacttgcccaaagttacacagcttggtagaaacagaatttaccacagaacttgtgtgttaagccaaataattttctagttccatacaactaaaaattggaaggaaaaagtagagccttatgaatagagtcctgagcaagaaggatgaacaatctgcagatgaagtactctgtaaaggaaagatctgggtttgaattctaaccctgcctccgttcatctgtgtgatcttcgcaaagtctgttaactctttaaactgttggatatttataaaatgggactggtgctatttggcctgatatcttacaggggaagattcagtcaggccaggcgtatgtagggtctctctgacctggaaagccctatataaagacatggtaccattcttagtgttaggactgaaactacatccctagtgtcctgacacctcataccaatacccagaaaccctaggctcttccttcaatcccatactccttcctcagctgccaggacagcttggttaagaaaagccttgttcttggggagtatatccatgaaagtatctctatttcgttgcagtttcacattaagtaaaattagagtgcccttcacgaagaatatataattgaaagccctcccactgactgctggacaaagcacttgtcagtcaacaaaccaggtagattgagtctgccctcagagtttttgtattctgagagtgactagcaactttctctcatcctagagcaacagggctttcagaggacaggttctggggcagcatgtagccacgatagaattggtttgcttttgtgtccaaagtcatgattatcaggagagctgccatttatcaaccacctctttgatacttggtgtataggacaggcgtgttaactatattatttctaaaccacaagataagtctgtgaagtatttttatccctggtttacaaaggaagaaatgaggctctgcgagacatgccagaaagaacatgctctacacaaccaactggttacaatgtgcggctttgtccagcactacctcttctttcttggcaatcatcagagccactcaaggcttggaggactgtgctggcaaaaaagaaatcttgtattttctaaaactcacacccacactttggaggggacaagattgagatcaaccccatttcctactcttttctttatgacagtttatcagagcattttttccttatattcactcagtcctgagtttctatttagttgtgataatagatacatttttgaatttttaataccttcgggtgcaaatttggaatctatggaggataagggagtaacaaaatgttatggaaattgaaatatataaattattaattttccctctcctctacagatttacaatcactttatttggggatatcaagtaggttatgtggttactgtagtactcatttaataatcagattttatttagagaactataaaaggtacaacttaagggggaaatatattttagatgatgatttttttttcaatttccaatttttgaagaatgacgtgtttttaaaaacttttaaagaatttctcccacatttcactccctttaaggtaaattgatagctgtgaaaatggcaccttggaaacatttctgtcataatcataggagagagtgagaattattaatattctcagccatgtagcatcataaagtagatcacagctgtttctttcagaaaatgtcatttgattttcgatcagatgtatggtccatctcacaatctaaccgcttccacatctggaatatcttaactgaaaatgtccacagcattacacggcctggctcagggggagaaaagaactagggcctgcatcgaattctgtctctcactcagctgatctgcattcctcctatagcatttccttataattaagaagagctcatagatttgggaactgcatgagcctctgtaaccttctggtgagggtgagaagctcagaactgcatttctatgcatttttccctagtctttcctgcttcggaggagaagccctgcaagagcttcctgccaagggaccctgctttctcagcagccggatccggagagccagaaatccatcttcagctcctttgaacttggctgttgttaatcatgctgtggttgtcctttaagagcaaaggcttcacggagagcagatcagctggctgtagggagggtttcagcttctcattgtaggcagatcatctgctaacagcttactgagagaaagttgaggacatgtggctgaaacactgtcagagctgctgtgaacacagtccaagtgagcaattttatgacccaaaccaagcagacactaagtgctttctagtggtggaaaaggagcagagagaaaaagaacaaagaccaagtggtggaaacaaaaaaaatatatatttctttcagcagctaacatatttttctgtttagaagattggtatctcctacttaaccacaaactacaacacataagatcaaataagattaaatgtccggtttgctaaatagcagagcgaagaaactaaggtcaagatttcagactcttacatctgaggaaagagagaggcaaagagaagatactggaaatgccaatatccagtcaatgaaataaacagaggctactgtaggcatccccagaagcttgccttttgtccagtgccatgggaaccacagaaggcactcagctttgcagcttcactcagaattggggcaatgctccatagagtcaagggcatgttattataaagtgctccatttgtttactttggcaagtggaagatgactttgctaagcgatactctgctggggctcagggccagcactgctggagtaggaaaagggagacttcctggggcaagccttctcaatcttcctgccagcagcattgcagtcggagcggcactgaggtgtcaacaaaaggatgatgaactgtgtcagcagtgttagcaaatggctgaagtagaacggagctgcccaggatgctgccctgtcgctggggaatctgagggaggctgaaagatattgtaaaagagattgaagggctggactggctggaggaatggtgccatcggcatccatgccacaatactccaggactgccctgcctttgtcaggacagccatcagaggcggttttccctctaaccaggatgggcatcactccttgggcttgccagtcttacctctcctcatgcaattgcatgtccaaggcatgccctcaggggatggtgctgatccagggtggcaaacccaagtggggagaaaatgctgaatctcatcctctcagagatctgctgcagtcagcgactatactgaggtgcatgatctgagcagcagtcgctggttggggaggcttctttgtggagtgggtctcagccacagcctgagggtcctctcttggggatgctaccagttaattgggtcatcttcagcctccacccaaacttaggcctgtaggtccatcaattactatatcagcctcaaggactgaacaggtgggaggaaggactagtgtgagtgatggaagcagctgagctgaggagtgctggcacctgtgcaaatccagcaagaatgacatctggctgagcttcagtcattcacctaagcaccaatcgggggtcactcccagatctgagcaatgagggaaacttcccagggggaaccccgcacttgggtagacctgggggagcagccagaaggaaaggggttgaacctgtagttgattaagattcagagaaagaaaaaacaaaaacagaaaacgatcatagtttcagacactcccaatgagcctgtgacctccccgaaatcctatagccaaacacacgggtggatctggcctcactttcccattctcccacttgtgacttttgattccacatcatagctaaggtcctcggcaaattggattaaactttggatttaaaaataaaatagaattaaaataaaataaaaaagttggggacaggagaaagtggtttccaagaacctacacctctctaccctgaaatgactgaatattgtgttcccctcaaaattcatatgttgaaatcctaacccccaatataatggagcctttgggaggcttcatgaatgagattagtgcgcttacaaaagggtcccagagagctctctcacctttttccaccatgtgaggttacaacaggaagtcagcagtgtgcagtccagaaaagagccctaaccagaacctgaccatgctggcaacctgatctcagacttccagcctccagaactgtgagaaattaagttatgtggtttataagccactccgtctaaagcactttattatagcagcctgaactgattaagacactcctgagaacgattccttcggggaaggtcttgattagccttcacctagcccagtttgcaaacacactggagtgtcctgcccatggcaatgttcatgtagcagcctgggagacagaggagggggattcctgcaggagcaatcttcccaaggaggcagttcctactagctaactttcttgtcctgcttgtgctcattgaaggtccaaacctgtcccctgccctatgtttgttttcctcctaatcccctggctgatggagtcaggctttggagaattcctttaagagtcttagttggccttatggatcccaaaacacacccttctctattgatgccagattctgagcaggctgacagtgcatgcatgagaacctttcataaaataggactattttttattccctttgctttttctttgtgttattttccctcttcactccctgtccttttaccttaccatatacatttgtcacctccttgcctggaaagcctagtgtcacctccctgccttttcacagcctataggattgagtccaaacttgccagcttggcctttcatggagtgcaggtttagtacaggactgctaaacacagtttcagaatgaaccattctcctggcctttatcattgccaatatttctctttattttattttattttattttattttattttattttattttattttattttattttattttattttattttatttagggagagccgatatttcataagagttgatggactgctttgcctggaaacttgagaattcatatttttattcaaaatcgttttcatttttttgcttagagcctgttaaagactgaggccctctctctgtcccttctactcccagccaaacccaatagacacatgtgagcaagttgtcacctgacccgaagctccagcccctggaaccaactgaaacaaaatgtatccttgcattttccagcaaggaattgccttgcctacaaaaatactctgtactttaatatgcagatcaattattaacagtaggctgtacctttcaccaggttgtaaaaggatgactgcgtagagccacagcattctccttgtcagtgtaggaaatgcagaggaggatttacctccggcacttgcctctaagacacctaataaagatgaggaaggctccagcctgaagcgtgggtgaggtgtccagctgcccaaaggcgacaggtgagatactcaggtccccttcctctttttgctgtcagttctgattctctcctttcaatctttctcatctgtgattgggaatggcaggggtggggtgtgtttggggcatcagtggtggtaaaaatggtcttatgggcagggccatgttgaataagagatgagcatggagacagcgtattaacttaaaaggccaacaccgaggctcatttgagaccgtaggaattccagggagacagtgttgttcaggcatgggatcgaagatcaggagggcggctcaataacacgctggcccggtcacatgacagaccagtccttggagtgaactgggagacaaggaggctgctttggcatggagctgagaacatctctagatcgcactggaaggcagagagaggccagacagggaactctgaagagctgccacagcctgtgccagggtgacatcagggtgagttgagatgatttttttaacaaacttcattttttgcagcagtcttaggcttacagaaaaattgaacagaaagtacagacagttcccacatacccgttttcccccacagagtttcttctattaataacatcttatgttcgtgtggtatgtttatcatgatgaaccgatgttgatatatcattattaactaacaagtccagagtttacattagggtttactttttgggtcgtatggttctatgagttttaacaaatgtataatgacctgtatctatcattacagtatcatacagaatagtttcacttccctaaaaatcaccctcccttccttcctgcaaatctctgacaactgctgatctttttactgtctctatacttgtgtcttttctgaaatgtcatgtagtcagaatcatgcagaatgtagtcttttctgactgcttctttcacttagcaatatgcttttaagcttcctccatgtttttccagggcttggtagcttctctccgttttagcactgagtgatactccattgtatggatgtactgtagtctgtttatccatttgggcagactttccagcaagatagaaggcagaagcaatggaaagggtggatgaagggaaaactgcaaggaacacaggacaagatagaagcaagagcaggaaggttttggagaagtggaaaaacaagctagagagataggcacagaggcctaacctggggtaaggcagggccttgtaaccaacgctcagtgagagaggcagcccctcactgacctgcaccaggcctttcctgattttatagacagagtgtcatgaggtcatgagggcaggaaccatgtcagcttcatcctgagagcccagcactttgtaggcatctaataaatatttattacaccaatgaaaccttcaaagtctcttctaaaaaagcaagttctcccagacaccagaagacaaatggcctagcagcccctgagccagtcatctcgggcagttgtgagctggttgcttatttgaaccctccatgccacggggcagcatcaagcttgcctgacacacacctcctgagccaggaattcaccactttgccaccatctctgcctggcttgggagatgctccgtggacagaaccagagccgtgctgcagggaagcagaaaaaccaaaggagatgcatgccaatctaacatgccagtttaaaaaaaggcattcttgcctcagagtaagaatccagctctccatgcactcgtctttcaacccaatcacaaggcatcagaattagcccatatgacctctatgggacaagaagagcaagcagggtgatttgggtgctaagaaatagctgtgagaggatgatgcggcagctgtgccctccagatgttcggagagaacatctgtgcaacaatagcagtagctcccatgcactgatgtgagaacccagcctaaggggtacagcaatctgggtggtagggggtagctctcagagggtctgacaattcacctaaagattgcaggaccaataggaacctgccagtcagaatttcctagctcagtggtgccctccaagcaagagagcttatcagccagacctgtgtcttggtgcaacatcactgcttaaaatcaagtcctcccaaggcatggtgtccattttactttctctggatgaaatgaagacagagaatgaacccagtaagatgatagagtgctttgctttggatctgttcatatcttacccgtgtttgtgctcacatgagttacacagtcagtacaagggtagagagctcttgagaatttcttacctaagggaaagaacttgggggctgctttgctcaaaggctatttttcagtgtggggcttatctagagacatatattttgctccttgtccccactgctgttgcataactacgggagttgagggtcactatacacagacacagatggtagagatgggggcagtggttgggcaaggaatagctgccttgccacttcgaagtctcctaaatggcatctctgaagaagaaggatatgtccacagggagaagggccccatggtgactctgttgctcctaatgtgccaggctcagactcttcaaaccacaagaagtggcccagcgagttccatgtaactgcaaatgcaagcaggaaaaaaccacactcagatctcagcacagcatcagtcttggggacagctggcctttcctaatgcagcagcatctggctgcttctgctgtacctggatgtcttcagggcagttcttccacacagaggaccccaaataaaagcagaattcctaccattaagctttccgtatccaaaactttctatgtgaaagatacagcatctgtgtctcacaagaatctgttttcttggggcatctgctatttggcagctaaccaaaacagaattcccatcttattttcttgttcatttgtgctacatggaagggactggtcctgaatattcagggcaacatccagcatttggtagtagtggagagaaagagaagagaaagctctggactgtgttcctctgtctgggaatgtgactctcacacctcccaaatcctcccattcacactttttctccctgactttccagaaccctttttaggcttagctccttttatcttaccctacacgctttctttctacccacactggtgggtacttttcagccatagacattggagcacatttaaatatgctggagtccttagagaattaagaggtgggggagagaggagggcacagagctgaggatggcactagctcattcacaaggagccctgaatttccagggacattaaagaacagatgctcatgacagagcatagagctctgccctaattgtttgtaatgttgaactatgtgtcattcgttcactcatatattctctcaacattggaattgagcaccaattatgtaacagagtaggtcttggcaatacaaagatgaatgaaacataccccttgtccccaagaagtatgtggacacgacaggcacatggaccaatgatggtcatgtcaagcgtgatgaagtccatggtcctgagggacacttggaccacggcctgcatgagagggcctggaacccaactgggcggatctagaaagaattcctctggacttgattcctgaacttgaaggtagagatggaaggagaagagttctgggtagcatgttcctggcagaagaagcccactgcaagagcaaaggcactgaggaagcctggtggtcactggaaaactgggattcaagtagctgaaatcgtaagggtgcagcctagggagaagtgagacccgtggtggggggcagagccaaatctctgtatccaaacctttctatatgaaagatacagtgtctgtgtctcacaagaatctgttttcttcgggtgtctgttatttgagtgctaaccagaacagaatttctaaagatggtctttgaggccaggtaacaaggctgaggctaagaagaactatggaaggtctgttggcaggagagatgtatgattagatctgcattagcagaaggaaagttctggctgaaatctgcagagcagtttggaggggacaagacagatgacatggagaacacttaggacgctgttataataaaataggctagaaatgatgttcctcagaagtccctttctccctgcacacctggccacctcagacttcctgttcaaggggaaggcaggctggggagagaggtttcttgaaaataacacatctgggccgggcgcggtggctcacgcctgtaatcccagcactttgggaggccgaggcgggcggatcacgaggtcaggagatcgagaccatcccggctaaaacggtgaaaccccgtctctactaaaaatacaaaaaattagccgggcgtagtggcgggcgcctgtagtcccagctacttgggaggctgaggcaggagaatggcgtgaacccgggaggcggagcttgcagtgagccgagattgcgccactgcactccagcctgggcgacagagcgagactccgtctcaaaaaaaaaaaaaaaaaaaaaaaaaaaaaaaaaaaaaaaagaaaataacacatctgttaattggatcatttctgtgtggtcaatgtctgtaggggctttgttttggtcatcatagtataaaatccccattatgtaaatatttcctcctgataaaagctcactgtgtgtctataaccctaccagcttccttatagtatttgctcattaccaggttcaaggacctgtctgtgtggctcttccccagagcctctgttggaaagaagatttgtctttggttataagtagatacacagtggtcaagatgctctagcacagtgcagcagaataagatgggctcagtagggaaagatcattcacccctaaagtgtacacttattcttttctgattatgataggattatgttgaaattaaaaattgtttcaacgaaaaagcaactgattgcttaggccaaagcagaactttttttttttttcctgaggcaaagtctcagtctgtcacccatgctggagtgcagtggcacaatctcacaatctcggctcactgcaacctccatctccccagttctagcgattctcctgcctcagacttccgagtagctaggattacaggcacctgccactatgcccagctaatttttgtatttttagtagagacagggttttgccacgttggccaggctggtcttgaactcctgacctcaagcgatccactcgcatcagccttccgaagtgctgggattacaggtgtgagccaccatgcccagccagaattatttttagtactgtagttaagagggcacattctggagcaaactgcctgctaagtgttcgctgtggggcattggggaagaacttaatctctttgtgccttggtttccacatgtaaaatgggataattatattgtccccctgtactggtttgctggggctgccataacaaagtaccacaactgggtggcttaaacaacagaaatgtgttgtctcatagtgctggaagccgactcacctcagaagcatggactcccttacctccaagtccaaggcaatggggctctctccctcttgcctcttgaattcctgcatctcatttcactgggtaaacagggaggctcctgtgctccagcaggaaaaccctggactgggaagcaggatgtctactctgatcctgctgccccaaagctgtgcggctttagacaagtggtttgacctttctgggctcagtttccttgattttcactattatttgaagggcttggggtcatggaaatcatgaactcttcacactgagaggaatcttcataatccattttgtagataacgaacctaaggctgaagaggtcaggggcttgcacccagtcatagagctaaatgaggtgcaaagaacctagaactccggcgtcttgactcccacctgggacacattttatcagtaatagtgaactctcatctgttgatagtgttagaattctcacatttactccccataacaactttcttttttttttttttaaacggagtttctctctgtcacccaggctggagtgcagtggcacgatctcagctcactacaacctctgcctcccgggttcaagctattcttcagcctcagcctccctagtagctgggaatacaggcatgcaccatggcgcctggttaatttttgtatttttagtaaggatggggttttgccatgttggccagactggtctcaaactcctgacctcaagtggtccacgtgcctcaacctcccaaagtgctgggatcacaggtgtaagccaccatgcctgaccagcacccttctgaagtaggtgctttcagaaatctgaaagcatagtgtcggttagcagggttggatctcttctggtactgtgaggaagaatctgtgccatggctgtctgctagcttctggtggtgtgctggtcatccttagtgttacttggcttgcagaagcaccatcgatctctgctttcatcgttgtgtggtgctgcccctgcatgcatgtatctgtgtccaaatttcccctttttataagagcaccaatcatattgaaatagggctcaccctcataatctcatctcaactaattatatctgcaataaccctacttccaaaaaacaccacgttctgaggtcctgggtgttgggatttcaacgtatgaatttggggtgggagggcacaattcaacccaaacattacctaataaagttttcaacagtaagtaaatgagttaactcctggaaagcatttaaaacagtgtctgacattcagaaagctctcagtaaacgttacattatgctgggtataaataaaaagctcccaggacagtggacggcattgagattccaccggtttgtattagtgtggcctcgccagtaatttacatcttctatcttttttggttggtcagggcttaagccataccaggtaaatattttgaataatactcctagctaaaaggtgcaaggagtagatactgtgggttctgatttttctttcccgttctccaagctgtgtacacagaaccatgcaagtcgccccaaccagggaaaaacaactgccatttcttttaaaggggaaccaatgaaggtcttgtcctgatgagctcacaaaagcaaacttctccatgtctgtcgctcactcagtgggctgaagcagagccttcacgctaagctttggagacaaagcttcttagagaatgtgcaacgtgggctgatcccaggctgcccaaggagcagctgacgagtgtaaaagtgtttgctcaccgattagaatcagtcctttaaaaaataaataaggtatgttgatcttttatgtgatgattaaacaaatcagatggcccaaaatgaattccaggtaaagaggaataaaatatcagaaggcaagctgctgaaattagcaagagctgaactcgaaaagcccgactttccaggcacggctagtttcttcctagcaagttcctgacggagctgggtggctgccccaggtgactgcagtagcaggagattaaggagacagcacctgcctgacaaaaaaggttgctgacacaataggccaaagttaaattgagctgccaagggaaaatgattggggatatgcagttaacagttgagggagataccagaagaatttgtgtccacagagagattttgatggggctgactttgccgctgaccgactcacctcagaagcatggactcccttacctccaagtccaaggcaatggggctctctccctcttgcctcttgaattcctgcatctcatttcactgggtaaacagggaggctcctgtgctccagcaggaaaaccctggactgggaagcaggatgtctactctgatcctgctgccccaaagctatgcggcttcagacaagtggtttgacctttctgggctcagtttccttgattttcactattatttgaagggcttggggtcatggaaatcatgaactcttcacactgagaggaatcttcataatccattttgtagataaggaacctaaggctgaagaggtcaggggcttgcacccagccatagagctaaatgaggggcaaagaacctagaactctggcgtcttgactcccacctgggacacattttatcagtaatagtgagctctcatctgttgatagtgttagaattctcacatttactccccataacaaccttcttcttcttttttttttttttaaacggagtttctctctgtcacccaggctggagtgcagtggcgtgatctcggctcactacaacctctgcctccagggttcaagctattcttcagcctcagcctccctagtagctgggaatacaggcatgcaccatgaagcctggttaatttttgtatttttagtaaagatggggtttcaccatgttggccagactggtctcaaactcctgacctcaagtggtccacgtgcctcaacctcccaaagtgctgggatcacaggtgtaagccaccatgcctgaccagcacccttctgaagtaggcactcttatacccattttactgatcaggagaccggcttgcccaggatcctgcagctactgaatagaggggccagaactttgctggtttggtgcgcttcctggtacacaccagctgcctccaatctccctttgataatcctagccacatgccaccgcgggtgctctagtgtaggctggcaccaaccccacccagcaagagccaggatctgcttcttgagggcaggcaggtttatcacacagcggggtgcagaagagtagtattcatcttcctagtgtaaccacttataactacttttcagtgaatcaaatagatttttaagcaagaacattgtaaaaatctgcttaatcaagggtggagcaaaatgagttagccagggccaccctagctcagatggggtggtagctgcctctgctccacaatgaggtatttacacttgctccccaccctctcctttgccccattatcttttagttaaagggccaggtgcaccagaacacaggtgccttgagtagcaccagcacctctcagggtcatagggaagagctgtttcctctgggtaaactgaggcctcaataaggcataaatgccttctctgggtgaagaagatatgccctctaagatctctccagggtgaatctagaataagttgtagtctagatggcttggcagcactagccagtgtgacagtaagtcttgatgaacatcagtcagcgtcatgctgagggacaacctcgaggagagggaatgtgtacttgttacaacagcacacccaatagaaatagcatgtaagctacaaatgtaactttatattttctagcaaaaaaaaatttttttaaagaaaccagtgcaattcattttaatagatcttatttgtttcaatatatcccaaatattgtcctttcaatgtgtgataatatagttattagtgagatattttccattccctttttcatacaaagtctttgatactcagtgtgtatttcactctgacagtgcacctcaatgtggtgcaataggcgagggtctatgtggtacatcccgtgcccagtgtgcacttaaaggctgtagatccatatatggcgactgtctcctagatagatgagcccagcaaggctcagtgggtgttttgaggtccatggtctctcaggtcccgttccaccccgacattcgacgaatcagagaacactaatatggttgggaacacttttatcttgctccccatagtctgaacagaaagagacgccacagaatacaatcacgactctctccctcctacggactccctccccacaagcaatcaatgggctggtctcagacaaagacacctagtcaaggctggtgaaacctgctctatttcctagtaggcctccacctgtaattctcagcagtttgtgtgtatagatagaattcctgccttctactaatgtgactgttcctgctcagagatctagagttaattattagcaaattcacagtgaaccagagctaggtcttgctgtaaggctcctgtgttttttagaagtacgttgccatggggatttttgtccccactgggttcctcctcaggaccccagacagatagatacacaaaccctgggcccataattttagttagaaaaggcccaagcctagaacctcagggaactcatttggaagctttttttttttaggaaacttacctttcctatttgacatctcaatcaaacaggtgtttggggagaataaaagcatactaccttagaagggactggggtcatctggccagacttgtggaataaagagaatttcattccttgtataaaataactctaaataatggtaagctcttaggagacttgatctactggctacatatacccactatgaaattaacacattctggaatttagatggaagaatatggaaattggtccttctcagtgtatggacgaagcatcagaaatgaagagaagggccaagcctagagagcaaaactaaagactcactggtctgtgggcttcctgcccaaggagagctgaaagctaaaggatgcttcacaatgtcctacaagttgtttttctaaagtccttccagcggttgaaactgtgtttatgcaaaacaaaactttcctttgttgctataatctagaggtggactttggcttaagtcatgccaaaatattatcattctaaaccagtaacacctatatttgttgagcatttactatatgtgtggcactatgctaaacttaactaccccttttcctcatgtgtaacagtcaggtgacttcacagctgccttgtggatacttgtgttatttgaaagattgcataaacacatgtaaaatgcttagaagtctaccacctcatcttacctacagctttggtgagtccctgctttggccaagtagaatcattccctgtgaggaggggaagaggataagaaacaggcagagttgaccttacaggtagacacaacaggcgagggtccatgtggtgcaatggatcccatgcacatgcctgattcagtcattctagttgagtaggattgtctggttggttgttattattttgttttttgtttgtttctttcttttgttttataagatggagtctcactctgtcgcctaggctggagtgcagtggctcaatctcggctcactgctgcaacctcttcctcccgggatcaagcaattctcctgcctcagcctaccgagtagctggggctacaggggcatgccaccacacctggctaatgttttgtattttagtagaaatggggtttcaccgtgttgcccaggctggtctcaaactcctgagctcaggcaatcctcccacctcagcctcccagagtgctaggattacagacgtgagccaccgtgcctggccagtttttatcttgaaagcttaagggtctcccacttaaattcaaatactcttctgaggataaccttttaatcagccaactatcatgaatctcaattatcaggaattccagttattccaattatcaggaattctttatatcatcccaggaatctaaaagagcaaggtcttataggtaagggcaaactttctgatgccttggaattcagaccctaagtagagatggtcatttgacatctagtctgatcgactgtagagttacttctatacaaataaattcaagttatcacagggtttctttcagttggggacaatactttgaaaacttttaggctctgaatgaataacttggcaaaagaaaatgttagggtccttcaaataccatacttgttgtggttttctcacagatacaccagtctataaccctgaggtttcaacactccactcagttgtgggctttttatctaaatcaaaactatcacatgcccacatgtgcatctgcagccaaccacaaatgatctaacaggaccagatttcactggagctctgtgacccttctcccagtgtgaactgaagggaaaaaaacctggagcctaagggactcccttttccgtgtcctgaagaccactggctttggttaagccaatatgatgggctcattgagagagagactcaggacctcggatcatgccacactctctggccccagaaggcataccacaggctgccagctttgttggagaacctgagacttaaggccaggatatatcaagagccctgtacccagttctgtgatgtcttaatacctttgacaagagacattggcaactcactgggtgtccattggggggcgacaaggaaacagactgatgaaaccagagaatgtgacaactaattacatgttgtttcctgtagaagagaaattctcagaggaacgtggtgactgtctgttctttaatggactgtcatatgaaagcaggagaaggagattcttccttactccaaatgacaaaactaggagcagtgaaatgagcttataaggtggccgggtttttctagcaattggagctctctgcagtgagtggacacttggcagggtagtgcctactccgcatttgatgtgttcacaccacggctagaagtaggtgtcgcaacttccagttgaagagggaattcttttccttgggtgggagaggggctagagaacgtctcaggttgttgctaactatgagcatggttttataattgtttaaaagtgggtaaacaagaagagtgtgtttatggtgtctgtattccacaaactattatttcccacattaactgtttcatatatggaaaatctgagaaacaggaatgctaacaaggttgcagtataatttaaaaatacttctgagagatcattgtatcccaaaggcagtgcccagtgaggttaagagcgtggtttgtggaatctgagcccacaggggtttaaatcctgcctctgcccttcttagattctgtgaacttggacagattccctcacttatttaagacttcacttttcagcccttgagatcccacctgctcaattatctaaatgaaatctatcactgtggaaacagcaaaggcctcctgctgttgagcaaaatgttttccagtcctttgtttctgtgtgaaataaagcagctccatcccagtgctaaatgatcaactgcatatgacagaatgagcttatttcatgctcccagtaaatacaagaccatagactactctggatggtagtttaagtttaagatgaaattgcttcttctgattgccttcttctttattgcttctttctctgttgttccttccttctcttgtttataacactaacagtcaaatctatctgtgtggaaatctatctgctatatagaacgctacatcacaatttacagaggggaaaatatttttgtcggcagtaacatttcactggaagaggcactatttggccacctaactctgggatttaggctcaggtagaatcagtgcctcagtttctttaggtcagccattatgagttgttccttatttgacctagcacatatatagatggtggttaaatttagcaaaattctcttcacaaaggtttcatttgtctggaagactctaagtactgatctggtcagagtaccatcaaagccccttgtttgtcatgagaccgtggaccaacatgttagtctttctcatgtaaaaaaaaaaatcatcaacaaatgcagtgggagttggtagtcatgagtttgaggtagtacaatatccttaaagtacacactcaatcatgtgtgataattggccaactctacctaacaacagttgaagacctccaaacagctatcaggactactggaatcatgtctccagaagaacctggagaaacattcacatttgtgtggaccaaggaggaaagcaacccagacgacttctacttagaagcacaggcacatagagcctgtgttattggcacaggtatttctctcctaagagccttttctgcttaagaaggcttgaggatctattcccattaatcataaaaaagggatttgctgggctaaattattttagcctcctctttatgccttacttcacaaagaattgcagttaatctgtaaatgagttctgatgttatgaaaattggatatggcaaattgtgttattaagtctattaagggatgaagaaggactcttctaaaagaataacgtagtctgagtggcagctctcacttaatagacatctacctagaaatgtttctgaacttaatggacacatgatataattcaaaattaatataagcacacagcacctctccccataaccttattgaaattaagggttccaaatcattcttctctcccttttacttcacctgcaacatgtggctcacccttctttagactaagagctaaactctaatgcctagttaatgtaaaacaatgccaggattattaagcatgattctgataagttttaacccctaatgagattatccttggttaaataaattgaatggctagtggaattccaatgtaaagtcagcagaggttagctggttgctagatatttaactatacataccaggaagctatgaggacaaatttccatttgcacagagccttgagaattggccattttaggactaaatgtgctgctcattacttttactcaaggacatactaatgaccaatatatgtttaaatacctactatgtacaactgctttcaaaaacactttcaatcttgaattgagaaggtaggagatccatacctgtattaggccatcctcacagtgctataaagaaatatctgagactgggtaatttattaaaaaaagaggtggatgaagctggaaaccatcattctgagcaaactatcacaaggacagaacaccgcatgttctcactcataggtgcgaattgaacaatgagaacacttggacacagggtggggaacctcacacaccagggcctgtcatggggtggggagagtggggagggatagcattaggagatatacctaatgtaaatgacaagttaatgggtgcagcacaccaacatggcacatgtatacacgtgtaacaaacctgcacgttgtgcagatgtaccctagaatttaaagtataataaaaaaaaaaggggggaaaagaaaagaaaagaggtttaattggctcacggttctgcaggctatacaggaagcatgatactggcatctgttcagcttctgtggaggcctcgggaaacttacaatcatggcagaaggcaaaggggcaacaggtatgtcacatggccaaagcaggagtgagagagagaacaaggtgccacacacttttaaacaactacatctcatgagaagtcactcactatcacgaagagagcaccaagggaatggtgctaaaccaaggtccccaacccccaggccacggatcagtattggtccatggcctgttagaaaccaggccacacagcaggaggtgagtggcgggcaagcaagcaaagtttcatttgtatttacagctgctccccatcgctcattactgcctgagctcagcctcctgtcagatcagcagcagcattagattctcataggagtgcaaacgctattgtgaactgcacatgtgagggatctaggttgcacactccttatgagactataatgcgtggtgatcggtcattgtctcccgtcactcccaaatgggaccgcctagttgcaggaaagcaagctcaggactcccactgattttacattatggtgagttgtataattatttcattaaatattacaaggtaataataatagaaataaagtgcacaataaatgtaatgtgcttgaatcatcccaaaaccaccccctctctgccccgtcccagtccatggaaaaattgtcttccacaaaaccaatccctggtgccaaaaactttgggaactgttgtgctaaaccactcataagaaatccaaacccatgatccagtcacctcccaccaggccccacctccaacactggggattataatccaacatgaaatttgggtggggacacacatccaaactatatcaataccttcataaaagcaattaaataactgtacagtgtgataggcaataaatgtcaaatgtcatatgtatgaggaacatagagaggtgctgttatcaagtcactgtgtgacccactgagcactcgcaatgaggcacaggtagtaatgtacctgctcacttgcttattgttgtcccaccatgctgaattgggagcttcatgagagcagggcccatgtcgcatctattaccacaactgccttattcgcgtggcctgtagctagcaatcagtaaaaaattacagcatggatgaagctacagaaagaaagtaaatactgacaggtgggcaaaatttttagatatggatatttaatgatgggatgaacagatgaatcaagacaggaaacaaggcttcgcgtggcaaatatatccttttatttgcccagcaaacatttgcagatccctcactatgtgctagacactgtgggcacatttctgtgtggattggtgtttttctctctcaaaactggagagattttgagatcagcctgtatgtagtgagatgaagaggtatgtggttgagatcaggagtagttgggattctgtgagggatagggctccttaggtgtagagagccttgagacctttgttgtgaggatagtgaaaatcaacaaaagaatttatgttaaggaaggttaaaaagtcactctaaaggtctcagaagtgcctatgacatcatgaggagatgtccattcctgaaaactttagccaggttacaaacactttaagaaatcctatctcaaaacttcaagaaaagtgagatctgtatttacacagatagaatttccaggactggattatatttgcacttttttgttaaatttttacttaactagtatattaatattgatagtactttgtgacttttttcataaatataacttttaaaaaatatggtatttctaaaaaggtttggtgcattgttaaaatgtggttttgatttattcacagacagaaatcttctctaacagactatacttccatttcgtaattcagtgaggtaatgggactcagttatactaaatttatcatagagcaaactttgctagttttcatctgttcattacattttatgtaatggcagacagtgtaataactaataccgttaacccaaccatctcttccctataatgtttctataggaacatacagtgtacattttgcagttctctacacgcagacaaattctaccagtgtgtattctgattacaagctagttgcttcataggccatatgtctatcttcagtccctatgaatcatgtaaattacagagcaaactgccgatactcagtatatgtatatgacacataagagtcaagtatactcagctcctaagagcaagtgagaagacaaagaagatctactgtgtgtagaaatacttcttaaatcatctttcctgaaggcctagtttgcaactgagtcgcaaaaatttggtttcaaaaagttaagcttgcaataataaaaagataacccagtttaacaatgggcaaagtgatctgaacagacatttctcaaaaaatgatatagaaatggccagtaagcacaagaaaagatactcatcatcattactaattagggaaatgcaaatcagaacgacaatgagtcacctcttcacagtcactaggatggctatgattaaaaaaaaaaaagacaggcaataaccagtgttggcaaggatgtggacaatttagaaccctcatacactattggtagacatgcgaaatgaaatagtcatttcagaaaacattctggcagttcctcaaaaggttgaacataaagttactaggtgaaccaacaattccactactagctatatatccgccaaactgaaaacagatactcaagcaaatacttgtacatgaatgtttatagcagccctattcacactgtccacatacttgaaaacaattcaaatatccatcaatggataaatagataaacaaaacgtggtaatttgtacaatcgaggattcagccatagaaaagagtgaagtactgatacatactagaacatagatgaacctcaaaaatgttatggtaagtaaaggaaaccagtcaaaaaagaccacatactttatgattccatgtgtatgatatgtccagaatagggaattccatacagacaaaaagtagatgagtgtttgccaggggctggggagaggtggggatggggaatgactggctgatggttagtttccttaggtggtgaaaaaaatgttttaaaattgattgtagtaatggatccacagccttgtgaatataccaaaaaccactgaactgtgtaggggtgggttgcccctccacacctgtgggtgtttctcgtaaggtggaacgagagacttaggaaagaaaaagacacagagacaaagtatagagaaagaaataaggggacccggggaaccagcgttcagcatatggaggatcccgccagcctctgagttcccttagtatttattgatcattcgtgggtgtttctcgaagagggggaggtgtcagggtcacaagacaattgtggggagagggtcagcagacaaacacgtgaacaaaggtctttgcatcatagacactgtaaaggattaagtgctgtgcttttagatatgcatacacataaacatctcaatgctttacaaagcagtattgctgcccgcaggtcccacctccagccctaaggcagtttttccctatctcagtagatggagcatacaatcgggttttataccaagacattccattgcccagggacaggcaggagacagatgccttcctcttgtctcaactgcaagaggcatgccttcctcttatactaatcctcctcagcacagaccctttacgggtgtcgggctgggggacggtcaggtctttcccttcccacgaggccgtatttcagactatcacatggggagaaaccttggacaatacctggctttcctaggcagaggtccctgcggccttccgcagtttttgtgtccctgggtacttgagattagggagtggtgatgactcttaaggagcgtgctgccttcaagcatctgtttaacaaagcacatcttgcaccgcccttaatccatttaactctgagtttgacacagcacatgtttcagagagcacggggttgggggtaaggttatagattaacagaatctcaaggcagaagaatttttcttagtacagaacaaaatggagtctcctatgtctacttctttctacacagacacagtaacaatctgatctctcttgcttttccccacagaactgtacactgtaaaagggtgagtttgtggtatgtaaatttatctgaatttttaaaataaaaaagaaagttaaaaaatgttaaacttggaattaatgatggtttttttgaagcagattagtaactactgaaattagtccttgatttttggaaaagcctttaaaaaatggtaagtgggagaagttataaacaaagagatgaatgagtcacagaaaattgggagacaaatagatgataacaagggacagtacagaaagactcaactgagttttatcaaatcactcaggcagataaacatgggggctgcatgtgcatccgtatgtgtgtatatgtttatttacatctaatatacacacatgatattacatgaaatattataacatataataaatatatattcatactggaaaaattctcaaagaatataccaccaaatgttaacaatagctgtccctgtttagtgggatttcaggtgacttagatcctttccccctttggcctctcagtatcttgtaactttgtgtgctaagatcattgatagttgaacaataagaagaagaaagtgagtgtggaaggatgttgctagagaaagtgtattcttgattatatggaggaagtgggggcagtttgtgaagtcttccttacgaatagcatcctatttgagaagaccagtcttcacactggaaaaaatgcatagagcaaggtgggcatcacttgcagaacagtttggcacaggactacctctgaaatattaaggcttaggagacttgttcttagaaactcttcaggcaaagtttacaaaaggccttttcctccttgcttagcagattctcccaaggcatccacatctacactctccgtaagtcactatatactggacctagcacacatctgtctacccatcattgtattagtctgtcctcacgctgcttataaagacatacctgagactgggcaatttacaaaagaaacaggtgtaatggacttacagttccatatggctggggaagcctcacaatcgtggtggaagacaaggaggagcaagttgtgtcttacatgaatggcagcaggcaaagagagagagcttgtgcagggaaactcctgctttcaaaactatcagatcttgtgagaattattcactattatgagaacagcatgggaaatacccgcccccattatttaattatttcccaccaggtccctcccacaacacgtgcgcattatgggggctacaagatgagatttgggtggggacacagagccaaaccatatcaactatctatctatctatccatccatctgtccatccatttatctttaattgggatacgtctacaagacaactgatacctaaaagtatgggaatttcatttgctaagtcacaaaataacttttaaaccatccttatattatacctaacatgatctgagcacataatattgtctaagtcagacccattcttgcctctctgagcttacactcttgtcaagtgtgagccagaaggagttggtccaagtagagcaagtctcacaggctttgtggtactcagggtgggggtcttacccaacatttcctcccagaagctgaaaggcagagacaagaaattcatcctgaaagagttcacaagggtaaagtcaaggtggctggtccccagacaggtcataggaataaggttctggtcatacaacaggaggcaaggagcccaagtagagggacttgggtgtggggcaagtgggagggtttcattgaaaaactaggtagaagacagggagtaatggtggataaggcaaaggacagcatctaattcaggcctgtcatcaagctagagaatgttcacagcagtgttgtttgaaagagaaaggcatggaaaacactttgttgtctatcagcaggtgtgaataatttaattgtggtgttttcaaatagtgagatttccagcagaggaaattaataaaccagagctgcatgtgtcgatgtagaaaaaaacccaaagtgtccagacatggtggctcacgcctgtaatcctagcactttgggaggccgaggcgggtggattgcctgagctcaggagttcgagaccagcctgggcaacatggtgaaactccgtctccactaaaatacaaaaaattagccgggcgtggcggcctacgcctgtagtcccagctacttgggaggctgaggcaggagaattgctagaacctgggaggcagaggttgcagtgagccgagatcgcgccactgcattctagcttgggtgacagagtgagactccgtctcttagcaaaaaaaaaaaaaaaccgaacacccagtgttctcactcataggtgggaattgaacaatgagaacacttggacacaggaaggggaacatcacacaccggggcctgttgtggggtggggggaaggaggagggatagcattaggagatatacctaatgtaaatgatgagttaatggatgcagcacaccaacatggcacattcatacatatgtaataaacatgcacgttgtgcacacgtaccctagaacttaaagtataataaaaaaagtaaaaagaaaagaaaagaaacaacaacaaaaaaaaactaccctttaaaggaatgcatataaacaataatttatttctttcacattcatttcacagtttgcttactgaagcatcagtgtgtctttcaattggatgtgatgtgttttgaagacataagaggcaggaaagttttggttgccaaaaataaagagaaacagggaagaatttagcttctgaactggatggtcactcttgccagaggccttggaggagggcaaggttttgcattttgtttgccaattttttccttaaataaagtgccctggacttcaggtcagtcttgccccttgagctgctaaatgattctgccagattctttcagctgagctgtgcggggtcctgaagacctgctttgacttcctctgcaccaaactgactcactccccagggaacaagatcaaggctgaggaagagaaaaagcagggcatgaatggaccctatacccaaaatagtaattccattttctccacctgccattctaccatcacagtgaagcttttctaaattgtaagaggctcttgtaaaaatgaagccactcctgggagatgttgaattttatcagccaacatgtatgtgggtgtccatggaaaacaagaccttggcaaattataccacaaatgggctggggcaagtgggaggagagtgataggagaacgtttgaatcaggacaaaacgagtgaacaatgtggaggcaaagggtgggaacaagatgtgctttgccaaccagacaagtttttcaaggctaatttttctagagaccatcttaagaacaattgcaacactagacaaaaagcacacaaaccaaaaaaagaaaaaaatctaaacccaacagcctaagtatcagaaaccatcttcttatccatatggttaaaaagtcaaaatgaatttattacattttcacagaaccatttcctgggccggaactcatttctccttaaataaatactataaaattttcctcagaacaaatcaagtcccctctataaccccagaagacaaagtacatcggcagtaaaaacagacacaaagtctccactgttgtcagaggtagcatggcctggtgggaggacagggagctcatgctgccgcatcagtcgggaggagggatttgtcttctccacagggcaggatccctacaggaaacaggacaaactgagaagggcttgacaatggaactctttacaaaggtgtcagcagagtattcaaaaccacaggagaattgagtgtcagggctagcaactgtacggttccagagccaacccatgtcggaagggtcagagggtgggacagtcaccacaaccccagaagggagagttctgtagaaagggccatctggagggaagcagtgaccttcagtcagcccaaggtgacagccaggcagcaaggagatgagtaccctcagcctcactccttcccttcctccaacctcctaccaagcctccctgtgggtcaagctcatcctgggagtcagaaggcaagagagcccctagatgcagtccacatagttcagagcaggttgcaggtcaggaagggtgaagacaggagaggcaaagggaagacattgggcaggtcttccagctcacggccctgtcatgcctgcagtcactgtagtacagactgaatgttcactgtgtcctgctttcagcatttaagatgcctctgagataaagagcctgccttgagtctcacgggacatgctcacattttctgaaaccatgtagcttgcactgttaacctcttcctcggtttagaggttttaggggctcgtttcacaaagctgccccagcccctcatgttaaacaacctgagggctgtgactgggcaaaaaataaataaatacatttgcattcaacattgacaaaatacacacttaagtgagacttttttgcatcacaaaaaaataagtttttacttttttcaaaaagtaaaggttctttaaaagatatcatctagagtagaattaagggctattattagaaaatcacagtggtccctaggcaagacattttgagggatgaacttaagcaggccccagactcacgtcttccatgtcctacaacccaggcataccccatcatcccataccttcaatttatccaaatacttcctgtttcagttggcaaattccactgccccaagcttccaaatgtcttccactgctggcttagccttcttcctaaatcccctccccatagtgtcctggaccccattaaaatgccagcaatgaaagcatctcctttcccctgtctagcacagccaggtacatctgttctgagtggtcagtgcccaaaacagcccagttgctaaacagtttgaccatcacctatgctcacacaggagttactgagatgatggtcctcaactgcaaataaaaaaacacaggccactctgtaggagccattagctcacaacttgctgggcaggctcaagttttaggactcagcatgctgaataacacctctatccaatggtaaatttctctggaaatgaatccaaaaacctctcagatgacagatcctgggactttcaagttgttacatagcagcaagggttgctgtcatgatttgtttactctttgattccctgctgtggctcatttgagatcttggagtgtttgctgcagtaattatggcaggatttttccagagtggttttagcatcagtgaaagaattagtgttcattactccttaattctatcactcaacaaattataggggtaaaattagatcctattaaaaaaaaaaaaaaacagggaaaaacagcaaacagaaacaagccggaaaagaggaaactaaattcaccctctaatactgataagcaattcttccctaccactaaattttaaaccttcatcagagacagtactttgtccgtttgttcaatactttattcttagtgcctattacagtgcctggtacatagttggccctcaatatatgtttatttaatgaactgattaaataaactagactcaggctctgacccttgtgctaaatctgtgctcacaatagatgttttagggcatattaaattttgaagtcagttcatctctatggaatttataggcaaaggggctttctttttttagaggtaggttcttgttctgtcacccagactagagtgcattttgcattttgagtgcagtggtgtctgccagtcagactagagtgcagtggtgtgatcatagctgactgcagcctcaaacttctcggctcaaacaatcctcccacctcagcttcctcactagcagactacaggcacatgccattgcacctggctaattttttaattttatttttttatttttgtagagacagaggtttgccacattgcccaggctggtctaaaactcctgggctcaagctatcctcctgcctttatttctattttgaagcaaacaaaatgatgcaaatgaataaagagtcctaggaagaagtgtcctctgctcttgactgtccactaactccagacttcatagtggccccctttgcttaaggcatatgataaacttctaatgatgcttgaattatatttccaccagcaggatcagttattttcctcagactcaaattttgcaatcaaaatgcacagtgtacacacggctgcttatattgcagcacatagcatctattttaccatttcaatttgtgtgatttcttacatgatggattgtgggatgacaataatgtgttctcagtgaagcctcttgactaaaccaaaatttgcatttttataaacctccatgaaacagctttacttagtaagattctataatgctatactaaagaaaattacgtggtagcttctaaaagaaatactccctccatcacagagaccgagcctcatatgaaaacagtaagcagcacacaggaaactcatgctgtagatgaatttggagagccacctcaggttatctgcattatagaatgctaaacgcagactatgcaagaaaccagccacctagagagatctatatagaagtagagaaacttccataccaccagcaattttggctttccaataaatattgagtgatgtccaaaagtcgtataattcaaaaagtctagggtaaggaacaagataaaagctaaccctcgtgggtgttggtaaatcaataattaattggagatcttccatgatatttcctcataagaatcattgctaaaattgttgtaatgactacacagactcccaagattgcaatagtcaaacaacacaaactgttgaagtcatgaagggatatgcaacatggctccttggttaaccttttggtagggatccagtttccaccatcatgaagtcctgttttcaatattaatttacatcattagaatgcctgctgttccatcagcattttcttgagatttcctgggccattctcagaaaccagagttagaatgcagaaattaatcatatttcattttgacctaactattatacccagatatttataagcctgaagtatatttttgccttactgataaaccaataagaaagaacttgaatatctcataaaataaggtctttccgcaagccacacatatctagatatggataatagagctaaataatcaggtgtcgagtccaatacactgtcaatctatgtttgacaagcatccagttccttgccttgagtcattcagttcttcgttgttcttgctggaatgaaagcctatacaaaacctagcattaatgaagttaatatgaaactaattagctgcaatgctactgcgggaaaacggccaatcatcatttaatgaatgattctcagttaagcacttcagaaaagtatttcctctgccccataatcacccagcttcatgaagatcctgctttccaggtttgaggtgtgggatccagattcacttataacctaatcaggaaatgaacaggatgatcttgtactgaagtcctatattagtaatatatcaaatgaataaagaaaaatgtaaataaagttagaacttgtagtatcgttttatcaactcgcagtatgtgaaatccatgatgtacctgcaccataaataaaacaagatcttcaaacttcccagggctatttaattcttccatgatttttgttcacaaagaacaatcattgctcagcctattcattgctccttttggaatgaaatacttttattactattcacttcaaaatatttttaaatttctgttgtgattgctccttagacccacgggtttattaaaagtatattgcttatttttaaatatttagggatattttagttacttgtctgatattgattcctaattcagtttctctgtggtcagaatgcatgttctgtatgacttcaaccctttgaaatttgctgaaacaatgttatgattcaggatatggccttggtgaatattccatgagtacttaaaaggaacatacattctacagttgttggctgtagtgttttattatataaacgtcaattaagtcatttcttaatcatgttgagaaatcatctatgcccttactaattttttattttcatgtttaatcagatatgagaatggtgcgctaacatcttctatgattgtgtatttgtctatttctgcttttagtcttggaagtttttgctttgtatattttgggtctatgtaattagatgaatgtagatctttattttcctgatgaattgacccttttatcattatgacatgtcactttttatatttaatagtatttcttgcattaagttttaatttatctgatattatgtataactctaccaactttcttcaggttagtgttatgatggtctttttttcccatatctttattttcaaccttcttggtccttattagagtatttaatccatttacatttagtgtaattactggattatttgaatttaaacctaccatcttagtatttctttttctgttgtctcacctattctttgtttctattttaatccctgctttataaaaattttaaacaatgacaatttttaaaacattttcatttatcttctttgttaccttattaattaggcctctgttgtaattcacctagtgctaacccagggattatagcatccatctttcactcattacagtctacttaagttaacttagtcctttagttagcatcatttctgtcttccatactactgtatgcgttttaattctacatatattattaaaattataagacatttttattgttgttttaaatagtcagtttaaaaaatgtaccctatatttactgttttcaatgaactttcttttttcccacattacatacttccatgaacacctccttttggcctatagaactcctattaatatttcttttagttcagagctgctggtatgtattttctcagttttagtctgggctcactttctgtgattctctcatccctggattattgactttcaaaactcagtcatattggcagcccctagcccagtgacactgtctcaaatcccagaacaatttatttaatgccacatctattcttgctccaaaaattggcaaatgcctcaagaagaaatgaagagaagccagtatgagactcgcctcaatctacttcccttttctgtgggatcttggatccctctcattgaccaatatctttaaagagttagatgatagatagatagatagatagatagatagatagatagatagatagatagatgatagacaaacagattgatgttatttttagcagcagcattagtgtgaataagctactccattttagctagaggtagaagtaatttcttcttagagaaaaagtttgtatagaattgaatttaccatcatagccattcttgaatgtcaggccaattgaactcctaagactctagcatatacaaaaaacagaaaccactatttcttatcatatgtttaagggtgtgtatttggaaccaatttagccacaaacttccagatgatgctgacataccaataattactattaaaaagcaatataatacacagggaaagcaaatatagtcaattgatatatgagctgttgctcttattgcaaggattgtaagagttctgcagtgtggccattatatgtgtgcctcacaacttgtattcattgtaagcttcctttgagaatttttatctaagaataagtctaccctcattttttgtggagtatcagagcttcttctcctatttgtcttcaagattgaaaggagaatattgaatgctgattctctgaacatctgcaataatgtattccaagatattggcaaaatcagtccaaaggctcaaccatcccagctaattaaattacctggttaactctgtggactaccaaatctaaatggatgtaagagaggaagaaatttgaaaaaaataaagattacacagttgaaaaaacaagatattctccagttatgaattcttttccccaagagtgtcttttgtgtacattgttattacaaaatccagttgtcacattaaacaagccatgctatccaaagcagagttgattgtggctggaaatttattccaatattgaaaagatgtgaaagggctataacacgtatcagacaatctagaattgaccactaggggacatgaccatgaagccttagacaataattcatatttagtttgaagtactattctgaggcaaaacaaacaaaaaagaatgattatggaggactcaatcttaaagtgtctccaagcatgtcttgttctgtctcaaaccttggcctcaacaatcaaagctctgtatcattatttgcaacacatgaatgctaaatggtatcatttctgactatggacctatgtgtagttaagttgtgtgtaggaatatgaggatagaaactattactatcaaccaaatggtaatattggacatgtttcaaagattgtctgaaagagcttgtccatggagactaacccttaacaagtcccaggtttctcctctcctagaatgtgaattccacgttcaccagcagaattcagttctgctgaaatagtcatggaacagtattgttttaatttctcaaacttttcaaccatatgtttataaaggtttataagacaaataagactatccctggcatataattctttcagtaaatacttcacatattcttccataagaattagcctcttctgtaaactctggagctaccccaaggtaagatcgtactactgtaaataagcccgaatcactagattccaaaggccaatggttacccaggcattatttgtttatgacctaagaaaataagtccatagaaataaattggcttgaacagaaccatcaaaaacccctttcaatagacatctcaaatgaaataggtggttctacttcctgagaacacctaaagaacctttgtgtaaaagaagaaatcattatttccattcagtagcaatttttgaatggtgtaacttgctatctccttgcctattggtacaatgcagagaaactgttcaaaggtgagccattcggtaaagaacgatagagttaatcagagagtctctgttatgcagctacatggaatgcaggtgttcattgctggtgtttttacccgctttgagttcttgtttgtttttgttcctatagtaggatgctgcactgatttgggcagggcaaagtggtggttgatggaagagcagaacacctgggaaagtcatccagagtaatttttgatcccaagaaaagatcagcagaattctccttgagtctctaagtcttcacattgtagaactgcttaggtaaaaactaattcaggaaatgtgcagttataaaactttaataagtcacccattaactgacattttaaatgtaaatgtactaaggggactctttatttccctctcattcgtaagtggaccatcctcaacacagagacccaaaccagaaacttaggaatcatctttgattactctctttcaatcttatcaaatcttattagcaaatcttatccctgaaatctttgtccctgaaatatatctcaagtcttacctgtcctcaccagttccaccgctaccatcctaatcctggcatcaactctgaactggactgagtcctccagcagcctggttccactgcttctattttttttccattgtctctctccatttcattgtacacacagttgccaaaataatattttaaaatctgtatcactaatttaaacgcttgtggcttttcagtgtacttagaagaaaatccacacttgtagaccctgatgcattcagcccctacctgcctccccagtcttataccagactccatttctcatatattgcagccatgcttgccttttcaacatctcaagcaatcgaagtgctttctcgatttgagactttttgtgcttgctattttcattgcccggaatgccttttctgagaatctcaagcagttgactcctctgcattttttatgtataagctttacatggttcatattcagagatcccttccctgagcacccttagtaaactgttcttggctttgttgggtattattggaacttaccactgcctataattattatgtttgtcatcaggtttacttgtttcttgcctgtgtcctccactagattgtaagccccagatatcagctaattggttgtataagtttccattctttatatagtctttgaatagtaatcatgtacttagtaaagccactaaggcaagtggccaaggagacgtggacagttatttatatctaatccaatctgaagaattattccaagcaaaaatgacgtgactgacggcttaaaatagctaaaaacttatttagttctatctcaaacctcagcttcaataagcaggctttcagccacatgttttcagtatatgaattgccagagcttcctaccaactagtcatatagtgtgtctaccttaacctggtacctttacttgggttgcatttcatcagcagccaagtccatctatttgtcacagtgtctctagtacactgcttctacatagtcagcaatcagtgaatacttgatgcctgcatgcatgaataaatgaacttctcaggaatgctagggccagagaaagttgatgtttaaaaagttagaaaatgtaggcacttgagaaggattaagaaattaacataagccttccttgaatttatcattgaaatctattattcaatttacatgtacaatttcagcaatacatatacttcctttagtcaaatacatctccctgtagcacttaccatgtctctgaccctttgccttgcaaattccactctgataataccagcagtgaatagaaatttaaaaagccactgtcctcactccttccactcatgttctaatgtaagcctttcttttatgcagcctgaatgcacaattcacttgtcattatctcgcatcctagctgctcctcatgaaatggcattcctctggatttgctgagtcctaatgttcaggcaaagtaaatcccacatcattctggcaggctttcaggaagacttagggactcgttgtctgctagtgcaaataacagcaaagtgtggtaggacttcctccttagttcagcgaagagccaggtccttgtcgcacggccatgaaaaattaggctcacagacgatttcgagggggagaaaaatgaaatttattgggcaaaaatggggaaattagaaacaggggccctctccaaagccagagtccctgctagagtacttcccacctcacaggttgaatcccaggtgccacccaggaagaggaggggccagactcctcccctctgccagcagagcaaacttctgtggctccaccccagtgtgtattcctcccagtgcgcaagtcggttggagttttctgggaaccgccttcccacctggctgtctcaaaaggactcccagttgcagaggtatgtgtgattcaacaagatccactggcagaaaatagaggcaaattaactcaaggagtccattggaatatatcaacgtactccccttccactcacaaggcaatgatttctaaaacagtgaatcattttacttacaaggggtcacaatggagacaggatagaggaaactgcccgggagacacagggacgaggcatgtggagaggtagaccttggatccagttctgcagccagtgagctgctcactcagacctgttgctcccctccagagcctccctttcttcatctggggtatgaaacaactggaccagcttatctctgagatcccgctcagctctgaccctcctgttggagaaggcttgcattctgagactgcagtcccaagtagcaatctcttcggagggcatgtatgtgattacgtacttagtgtgctcacatagtttcataagaatccggtaaaattcattcttatgctacttttgtattcccacttattttgaatggaaaatccttgtacatatttcctcaaattatggataaaaagtatacaaaatacaccctagaggccaagaagctccttttggtagaaagaatgttgagccctatgaatttgagctactcaaactttgtggtttgttttgggagccaatcttgaatataaaatattttttgatccagcagaaaggtgaaatcacattgaagtttacaaaatagtaatgctaagatagatagattttcttgtgtgccacacttatgttgtaaccagaacttaattcaccataatcattgacaagtcttttgttactggaaaggataagggttggcaggtcttgtgacaaatgttagaatttaatgcccaggatttttcttgatgcacaggactcattggaaaagcggcagctatttattgtgactgtgaatcacgtccacagatgaatatgattaagtgctaaatccatagcagctcaagttttttaaagccttggaaaattggctttaaaaagtatcacctgacaaacctcaagctttttctgtctcacaagacttttggaaaagaactaggatcgacagtgttttaaggctcacaaggaaaagaatctaacacttgtaaaattatcttctgtgcaagttttattttccaacgtgtatctgggctgccaagcatactggctctagccagatcttcattagccgatccaaaaagacagtcggggcatttatccagataatgcaagccaacactaccctctgagaaaacaaaaagtaacttgcctgatgaagcaaggaacctcaccgattattccagattaatgcatctccttttactggcaccatgatcagatattttcaagacaaagtacttggcaagttggaatccagctgggtcctttgatttttgaattcactttgcttctgtgattatggccacagttttgaaaataaagtcatgtggatagagttgtgatttttagggatcaggatgcctcataaaacaacaatgctgtattcttttgtagaacaagatcctgcctaggcctctttcctagtattaatctttggtcatgatgaatgtgctcccaaccatccaacctatccctttgcaaccaggcttttgtgagatcaaataatttttagagttgaaatgaagttattaccagctctaaaataaggtactacaggagggaagtaaggaccgacaagagttaaatcactttctagggttgcgcaggtaactgggaatgaagccaggatgacaactctacttgctctttcattgtatcttatgcttctctgatgtcttccaagggatagcaatataatcaatagtcttgaaagaaagatctttgtagagaaagggtcagcagattatgtttgtaattgactagatagaagtagttttgcttttgcaggttaaatggcctctataaaatgtaattacccaatgggttcttcctgcccactacacaaagaccacagcactgcagtaaagagtttaactgacacaaggccggccacgccatgtgagagacagagttattactcaagtcagtcttatcgaaggcttgtgggctagtggtttttcaaagacagtttaggggaagaggtgggggtggctaggaaatgggtgctttccactgattggttgaagcggagaagaaatcgtaaggggtcaaagctgtcctcttgagctgattcacttataggtggggccctaagggtgatttggcaggtccgggtgaagccatctggtacaagtggagccaaccatgtcagacatgcaaaaaacctgaaaacatatctcaaaaggccaatctgcaatagtgatgttatctgcaggagtaattggggaatttgcatatcttgtgaccagcctacaccttagcagaattcaggctcctctcctccccatagactggggctctctcatggctttacaaaggtggttgacttttggggaggggctattatcatttaaaccataacctaaaagtcttccaaagttatcttggcctcagcccaggagtaattaaggcagcttgaccactaaaggtaagagcagagatggctaaatcagatctccttcactgccataattttctcactgatacaatttttgcaaaggcattttcacccactacccaactgtgtcattgtagcatgaaggcagccatagaaaggaataggcatgactgtgttccagtggaactttatgaattaacactgaaatggaaatgtcatacaattgtgacatgtcacagaatatttcatttttaattgttttcaactattcaaaaatgtcaaaatcatttttagcttggtggtggactggatttggtccagagcagtagtttgcctgcctctgttatagagtaacacatctgagcccatgagagaattgatcctgtaccttgggtaatgctcttcctctctggctcctttctacacctcagtcacttttcccctgcaagagtgttgtcacattagactgtaaaattggatcacttttatatttcatctctaacatgccttatttaataaaagtcattctaggtatgactaaagttccagggctaacttagaaaaggactgaagagaagaattccttctgacaaatgcggacccagccacaaatgccagtgatattgtcccaagtattggtggcttgggttgcacttgataacagagggcaaaagaaagtataaattttgcttgttaacatagctttagtggaaaatacagaaaatgcccccaaactccatgctaagatcatgaactaaactgttacaatgaaaggaattacttgggtttctataaaaacagctgcctcaaggaatttgccacattccttgggtctgcctgagctctggtggcccactgcttggataggcctggtttgtttgctaacttaacatgcttgcttaacggccaaacattcccttgaaattcaaggactttctgtcccgctgacactgtttatttgtatcagtagagtggagggctctctggtgacactctagttttttctgggttataagcagatgcaggtctgtagtttttctgacttggatggggccaatgggtctaagccaagaggaaaatgcttttttctttttcgtgtttatttcctttttttttttttttttcctatcttgattggagtacccttagaaggaaaaggagagccataatcgttctctggaggccaaaagaaggccgaaggatgccaaaaattgtcacagtggtgacttttggctggagccagtgcagaatgaggggctatgagtgtgtcactagaactgtaatccagatctcttccatgaggtcaggaaccctgattcgtattgctttttccatgctgtagaacatgacaccccactcaatcacttgtgctggttcattgttacttgttatagtagtcattgttatcaagactttttggttgtaagtgtcagaaacctaactcaaacagagctaagcaaaaataaatctataaataaatataattagctcaaaagtctgaactcactggattgatcttcagacataattgcatgcagtgttcaagcagcagctaccatctctccttcccttcctctctcttatctctgctttcctctgtgttaacatcctgctctgataagctttctccatgtggaatgaaagacgggctccagcctttccaggctcctaagttccttgcagctcacggtcccagaaggaaagagattgtctcccagcatctgtctccataaaaagaagccaccgtccttgcttgagtcatgttctcactcttggacttagcagagtccagaggggcttggatactctcacttggatactctcaatacgtgccagcaaggggcacatattcacccttcattgggcaaggtaagcctgttaacagtcccactcgaatcatggggagtaagcaaaaggaagttctgaaaatgaaagaatgtgggacagacataaaactcaaagctgtgcactatgctagtaaattattcttgtgtacttaatatgaatatggcttttataaacagtaagcaaatcagaagccaccctgtgaatcatcagttatctctagacatttctggattccttctttattccctgataatcttctttccttcctttcactgcgttgtaagtggaaataacacaagccaaaaagaccctctcctgctctcaatacacacatggtctagttcaggaagacaacatataaacagcaggcatacgagcaatttcagtagactgtgatgcctgcccagggtgctcgtggtctacctttcatggaccaaagacaacaggaataagagcattcatcttcctctgctattgtgagaatatagacagtgcaaagacttggatgccagtgctaacatccctgcctgacctgactttgagaaaaggaccgccattttcagcacaacccacaggttctctaaatactcaaagtgtgaggctagcagataaatttggcttatagagggagcttcataccatggttagaacacagcaagaaaggaacaaatttttaatgtattaattgaaaatcagatttctcagctgggaagaagatattagctggaacacacacaaaaaagtatttttaaaggtgcccttttaaaggctgccaaaactcacccaaagtagtattcaaatatgaagacagatgtcttttcaagacgggaaattttagttccgagtatgaaagagaattttatttatttgttttttcccttgccttttcaggcttttcactgacttcgaggggatgagggtatgtgtgcttaaagtagatgccagagtgtcttcttggaacttcaggtttccatgagtagaaggaagtgttgaatgaatgaggacccacggccctgtccagtgtggacatgccataaccctgtgctgagcttcctcatctgtgttctgggcttacattgaatatggcataagcaaccccgaagagccacaaaactctgctctgttaagggaggagggcaagtcctccctggaaggggttgtctcatcaaccaggaaatggtggtcaggatggatacagtagcatctatacctcagcccccttgaagtatcctgatgtccactccccacaaaatctaggccttccataggaagtcaagaggatattgtgctgatataaatttggaccaccagtgagtttgccctcagacctggtaagaagtgcatatttcagatataagatattgctctggcctcagctacatacagtttccataaaggaaaactttgaaggactgcctgcaggaaaagaatagcctcgtgttgatgtatctagggacagaactctcaggcaggacaacagcttcctcaagtcttgtgactacactctttttcccaagatatctcattgcatctttaatttagctcctaattcaaagccaagctcatggactgtttcaagctctggaccatgagcttagctctgaattaggagctaaattaaggatgcaacgagacatcctgggagaaatagtatagtcacaagacttgaggaagctttagtgaaaagcagacccacccagcatgtgtaattcttccatgaggtttcatctcacagtctgcatgtcttgcaagtgggcttagggccacaggggcaggagctcttggtactcagaatgttgtctagaagtttggaggagagagatcccttccaacctaggtcaaaaggcagaactggtaaaggacttgcagacatgataactttgagcacaatatctgagagagcaatccatggaagtcatttgaggaagagcattgtagacaacaggaatagcaagttcataagccctgacctcaggaacctgcccggtacattcaggagcatcaaggagaccatactggccaaatggcacaagtgtgaggaaagtgttggtaggaggtgatttcagagggatgcctggaggccagatcctggagagtcttgtaggtcattgtataactttgacttttactttgaatgagatggtaagcacttatgagcagaaaagtgtatgatttaacttacgttctaaaagaagtattctggctcctgtattaaaaataaactgaagggcaaggagagaggtggagagacccattgggaggctaacgcagacatttatccaggcaaatatcacttagacctcggtggtgcaagtaaggaaaatgagaggaaattgcatttataaaaatctcatttaaagatagagtcaacaggattcatcattggattggattggagtaaatgagagagagagggaaatcaaggatgattcaaagttggttttgtttttttttttgttttttttttttatcttgagcaactggagagatggagacaacattttaaattactttgttctttggtaacatggcagtaaacacacttataaactgtattacaggtggcaatcaaaataagcacctggctgatttgaaatatggtttaaaaaaaattacaaagtaaggaagatgaacttgtattgttctgcccatgcaaacaatctgtaaaactgtgtgcatttatatatttttcagtcattaatatttacagcgggagagaactgtttgtgaaatcatgaattatcttttgtttgaattttattttattaatgagttagaagtacctttgtaagccattgtaccttttttctaaaggtgagagcctaaaactaccatgttgcaatggaataagccctggttctagcttcacgccctgggagtgacttctattagctttggaatctccggtaactcctttaatcctttgaattctcactttctatgtcttaaaggtgatggctgcccatttcatcaactgtgaaatggcatccaagtcccaggtatcgttaagaaccaacggcttccattttaaacagaagttttgttaaacaaatatttggttttacaagggtattataattcatacccttattcattgttcttccttgctcccaatagtcgatgggttttttttttagctgtggcttatgtgatcaaagaggtgaaacaagttagctcaattggttatattctgaaattaataaggtgttctttttgcatgtgtatacaaattaacttccctctgtttcttggccacacacctcacctcagcttcacaaatgagtagaattgattacaacatgaatcagacaagagagtgtagatctatcactgttattgagaaagcagttcaaaaaacaagcattcccgcatgttagtaacatgtttttataaaagctgtaaatgtatatttattcatatgatttaatattttttatcttcagtttttattttaagttcaggggtacatgtacaggatgtgcaggttagttacacaggtaaacatgtgccgtggtggtttgctgcacagatcctcccatcatgtaggtattaagcccagcatccattagctattcttcctggtgcccaccctcccctgaaccccctcccctgacaggctccagtgtgtgttggtccctgcaatgtgtccacgcgttctcatcattcagctcccactaataagtgaaaacatgtagtgtttggttttctgttcctgcattaattcgctggggataatggctttcagctccatccatgtccctgaagaagacatgatctcgtttttttatggctgcatagtattccatggtgtatacgtaccacattttctttatccagtctattattaatgggcatttggcttgattccatgtatttgctattgtgaatagtgctgcaataaacatatgtgtgcatgtatctttataatagaatggtttatattcctttgggtatatactcggtaagggaattgctgggtcaagtggtatttctgcctctgggtctttgaggaattgccacactgtcttccatagtggttgaactaatttacactcccaccaacagcataaaagccttcctttttctctgcaacctcactagagtcagtaatatttcttcaaatatgaaggacttgacctcagatcctttatgatgatcataaatacataaatagataagttaaaaaataggaaggacagtgtgatactaaataactacaaaattagagatgtatcaaaaagtatttaggcactaaaatagttgagagatcattttcagagcctccaagagtttctatgccttgaattatttgagcatccagtgcaagctttcagagtccttgcttccttaaatataaaacaagaagtcagatacctttgcctctgacttctcagaggtctttgagcttgacagttctataattctatgagttttctacctagaaactattccttccattcagttaggaaatatattcaagtatattttatttaatcttaaactttggaatcccattttggtaagctgctgttatttgaaggtgttgacgtatcctctgggatctgagaaaattattatcaaaaccaattaaaggaatcatctattttgtgcgattggttttgaaatctgtccagtgggctctttctggaggcaaggatcctggttaccaagagactttgctgcaaataaggcaaactgggatgacatttggggttgggatccttctcaggaccaaatgggcacccatcatctttgggtctagaagactgcactggcataaagcagctgacttcctgtagccttgcagaaataacaatggggtgtgtgtgtgtgtgtgtagtgtgtgtagtgtgtgcagtgtgtgtgtgtgtgtgtgtgtacaatggtggggaacagttggcagagcaatgagcaagaaatgggaaacgacactcagaaaagcagcaacctaccctgagcaaatcaaagaatttcttagaatgcaacactagctgtgtgtatgaataattggcttgcaaatcacttcctctatttgcttgttatataataccaatcatttcagtgtcactgacgaaagcccagaagggaattaccacttaccagccagttttacatatggcttttgtgaggaataaggccttgaggatgagggtctaaatctctggcccacagatctggacaggcagatttcaagctgatcattacatatcttttgagagagacaatcccagacgaattggcctggggggcaacatgagaaggcaagacaaaagaacattgtaaagacttcacctagaatccaaattgtagttctctcagcaagttatcaagaagcaaattaactgctagattttgtaatccaaagattatttaatctgtttagctttgtgttggaaggatcgctactaatcatctcttttattaaaatatgataatgatagccatcctttattaagtgcttatgatataccaggcactttgtatacatgatttgccttattcagaataaccctgaaggatcaatattattgtctccatatcaaagagagggaaactaaggcatacaaaagttatttgctcaaggtcaaacagcatggtaagaggaactgcaatttcattccaggtcttacggataccaagtcccatgcctgccagcttgcacctgttaagtcatgtgatacttaggaaatgtacacatcaccccagtgcagaggcctttatccacttcccttcattttgcctggattgttgctgtgagtgagaaataaatgacatgaaatgatcatgtatatcactgtcttcagaggatggttagttccttgctctggattgtttttctcttttgttggatatttattttgacttctctgcaaactaaaaatatgcatgctctagtttctcttgggtacataactcccaatatattgtgaagaatgaaactggcctacaaagtttaattaagaagcagtgaactagagcttacttagacaatacttgtactagtgtgggttcatgttgtccatttgtctttagaggtgtagaaccttgaaagtcagctaattaatcactattactgttgtgtacagtattggcaatctcctatgctaaaattttttgtgatgatttgaaggtgggaggggcaatatttactaagtctctcaacctacatggcaatatctgaaacctgcttataatgtagtaatagcttaggcaccacctatttctgaaacataaatcatcccacaatataagcctcccagttttattcatgcgtcttaccatgtataaatatcttttaatataccatttatttccttgagggacagttatttgtagcataaatctgcctggataaaatagtaaaaattgctatgccccagtgaattcagtttacaaaagcttacatacgtgaatgagacattggaaatgtggtttatagttaaggagaatggatcacgcggattatacctgtataacttccctagaaggttgataccactaagatattaacaccaaaaaactgaaaatagtatttttcatcttactttgttatgtaccctttgtgaatttctgaaaaacacctttctattatgatgggataaattacggtgtggtaacaaacaagcccaacctgtttgttccggtcaactagttgctttataacaaaccaccccaaaatttgtttaaaacagctatcatttgattgtgctcacaagttctgtgagttaggaaataagacacaacacagtggtcttatgtctgttgtgtaatgtctgggttctcagctgtgaacactcaaatggcttggaaactgaaatcagctggaggcttccttattcatatgtttggtgcctggctgggatgactcagattagttggggctcttgacaaaagcacctatacatgaaccctctcaggagccttggctctatggtggctggattctgagagggagcatgcagagaaaagaattccaagacaatggatgctctaagagaagctacttggccttttctgatctagtcttggtggtcatgcagcatcacttttgccacccagatcaaaggggaagaggagacagactccacctgtggatgggagagtgtcaaattcacacagaagttgtatgcaagctattcttggtcatcttgctcatctatgaaatataccctcctccatgcattgacttacaacaagggtttatttcttgctcaaagtctgctgtgaatctaggcaattctccagagcagctgttcttttgttggcttagcaatccaagctgctgcttccatcttacagcttttccatatcaactcatgattccacaaccattgctacgaggcaagagtagtatggaggatcacacactactcttagaaaccaccagctggaagggaattatatcactcctgcttacatttgatggctcacatagccatgcccaaattcagtagagcaagcatggccctcctgtgtacccagaaaggaaggagagctagaaatattggtaaatagcaatattgtttaccatagcctcagagatattgcctcgtggtgaaaccctataattcccctcaattctgatttttgccctttatcaaatcattttattcattccttcatccatccaacaaagatgttttatatgcctactattagcaactatcagtagcttgttcctggagggaatgcagctgctccccgccaaaacaccatataattcactctagaaaactaaaatttcagatgctttgtcattgattattgtggggagaaaatgtctctttcagctccgactttgtcctgtctcctctaaggcatgtgaaataagatttttttttcctattcttacctcctatggtcccattttatggttttcatgcactactgtcagtcaaatatttatcatatgtctttcaatatctttccaatatttatcatatatctttccccttgtaggccttaactttatgacccactattaagcacgcagctgtatttccagaaaatgtagatggtttaattcaatactgcatggcaattaactgtcttataaattaaatcattttaatccatcttagagttatcatgcataattagtctgacagcacaattctgtttgttgttgttttaaaggaaatttagatatcaaggctgcaaagaatgcgtaagtctaggcagaaggctcttattttccaaaagcagagcccatcgttgcatttcaacaatgaccgcaacaaaaaccatcaggagctgtttggggcctgtttgtgctttagtcttcaattagaaaaaaatgtgtttctgatggaaaaccatagaacaatcctcactctgtggtaagaaagaataaagagaaagaagtgggctctatgatagactgaagcaagaatactattttagactaggtagtggccgggcgtggtggctcacgcctgtaatcctagcactttgagaggccaaggtgggcgtatcacctgaggttgggagttcgagaccagcctgaccaacatggagaaaccctgtctctactaaaaatacaaaattagctgggcgtcgtggcgcatgcctgtaatcccagctactcaggcgcactggctcacgcctgtacttgggaggctgaggcaggagaatcgcttgagcccaggaggcagaggttgcagtgagctgagattgcgccattgcactccagcctgggcaacaagagtgaaactctgtctcagaaaaaaaaaaaagactaggtagttatcttcctgggtggttttggctatgtagaaaatcactcttactctcgattaatttatgtaccaaatcatgctttgaaatatcccactgaaaaggtctaaattattgatatcttgggtcaagttctgacttgaaggcaaatagtaggaaatacaatggcatttattggaggcacacactacaaatattgtagtatctttaagatgtgtttaaataaacaagtagatgataaaactataaattagagtcactaagactctctagcagagacccttaccttttgaagtgcaccttaaaatggcaacaacacttatcagaaattccataagaagcttagttgtctgctactctattgcagtatcatatgtgtgagctgcatgaaaactggatattattattatcaaaggttattatcaaatggagcacaattttattaataacaatattattattatcaaaggttttaatttgctaaaactatacagcttccttaggtcttccaaactaggtcagccagttaaccctcagatctggagtaccacatttggctgagtcagaagaaataaagatgctctcaaaaccacaaacaaaactgataatagacattctgataactttaactcccacagtaataaatcttgggtcttttaaagttggtcagatgtacacagagctgcttactaattatactaaaatagttactaagcaactcgacattttgatttccaagaatttcagataaagattatgaactttatttatttggtgctttagagtccaaggcactattttacagcctaaagctgtatttctcaaggccatcttcttgcattcttctaaaacttaagagggatcatctgtcctcaaaaatataagaaattctgtaaatgtgtatttttgtgtatatatatatttgatatttaaaattctgtatctatatatacttccaagaccccttagaacttacacggtacctgtaatttgtttcttttttatacttaagtacaagtaatgttagtgatacatttaaaactaggaattaccttgtttgcaatatcaaatttttgtaaaatattgagttaaaaaagtctcctaaaattaagatttgaactattataaatggcttcaaagatcctttcgtttctaagagaaggaaggaattaggatttattgtgcatgtatttcataccaggtgctcatctacagttattgaatccttgcaacaatcgtatcaggtaaacgctgttattcttctcttacagatgaaaaatctaaaccttctaaaatgaaagtttgtccaagttaacatgaccaattaggagagcttggattccaacccaaatctgttcagtatcaaagctcactctcttccatccttgccccttctcagctcacatagtagctttcagaaaacagtagctatctaccccagataaaattaagcctttttttccttaggagaggctagaaactgaatcttctaccccctttattggcatcacacaggcacaaaaatcaccaattctcaaaaaccctatactcccaagttcaacacaaattgaatggttggaatattgttggtttgtatggaataattaacccacatctaaaaattaattatacaaagtgaagtggagattgaagcagttttctagataattaaggcaaaaataactgcaatttttttaaaagacagtttgaaatatttagaagggtagattgcaaaattatccaacttaaggtagtcatattcagggagtttagccaaaacacctctgaagttcattgccttacaaatgagtataaaacttaaacctatgattaattccctgttgtttttctatctgtattatacatataaatatattttatatattgtcctcctgagatttcaagagcaattttcttctaattcttctaatttcttctatggattcaccatagtgaatccaccgacacgtctaccctgtgacaatcttgttctccatttgattgcatgaaaaataccatatgaatttgacaaatcattggtttttttgtttgtttttctcttttgctgcatatcattgcctatgcttcttgagcactagaatatatttgtgcatgtataaaccaaggcctttcttctgaaaattaatagtactttgaatctcttctatattctggttcttttaaactgtggttgttttaagtttgcctctcttgttttaggatttattctttattttgaggccctgatttttcacaaaacatttttctcaacgaatcctgagaacactggacaatcatagcttttagctatcatgagtcccattaccctttggcctccagttaagctctgtcctgcaagacataaattgtctgattatcaactcctactttgagtgaaaaatggttgaatgaaatgaatatgcagttcatttcaacaaagcaagaaatttgctgtttaaaattgtgtttttataattcttgagatggaaatatagcagacctctgtgaatctgagaaggcatttcatgcttccagaaatgaggggagaagtggcaatgatattgctcatgaacaattggaagcaatgatactagagtatgcagcaaatctcagggagatttcagtggtacagtaactggcctcacaaaagtgggatttattgcattaaatctttgctgtcctttctggctggtttgatatttaagaaattattaaacataaaattgtatgagcagttacctatggtaggacaaaatggactgacctctaatggcttggtagatgggataattttgggaagagagagtggagctcagttcagcatcctactctcctcctcaacatcatttcccattcttggcccttgagtttagataggagttgggcatgtgtgtgtgtgtatgtgtgtgtgtggtgaagtgggtagattcctgttcccaacccaattagataactccacttccatctatcttccttgcatcttctccagctcatttgcaaaagaatgaaagaagccttgcttcaaaaaggtttagagggctaaataagagcacaaactggattttctgaaaactgacctgattgcctgggtaattaagctgtcactccagcaaaagcatttgtctccaaaaagtactgaggttgtctttcatcactctaagtctagacattctgaaacctccatcctctcctgcagagagaggaattaagtctccacatttctaaaccattgacagtctgtggggtgccccattgtgttcctgacttcctattctcagaaggagttataacgatgacaatgatgcatgcatgagacatggaggtcctccccagccctcggttaggaagtaaggcagccacccatgtactgaacacaatagtgctttggaaagagctctgttaaaagtgagtctcaaaaatgtaaaggcctttacgagaggaacttaatctccagtgtgataaaacgatgcacacattacaaggagatggatgttatgaaaacaataagtacacccaagagtacacgtacaaatctgcattgcaattgatttatttggatgcctgtttcttcctacactatgagctccttggggccatgaaattcatttgttttatctatatatactctctttgatatcccccaccctgacagctagtgcagtcctttctaaatagttgttactaaatatgtcaaatcaaatgcctacaaggactggttggtagaaccagattctggaagtgaccaagcaggtctagcttcataagaatgccatcatcgtagatttgagggtcatgatgaagttgtactaggatttatggaggttctttgtcaaccagttcacaccaccagtgacttaaggaaactatatgtcgtctattgggaacagtcctgcttaaagcaattagcagggacaattaatttggagggaagtctctctccactcaacagcattcaaataccctctgcattagccatgttttgaaaaactccaattgcctgagtcactgatagacaaacagaaatgcagactattttgtatgcagttttataaagaagtttctaaccagagaagaaaggtgttattttgaaatattaagctcttagttgttctttcatttcagtgaacatttgttgagggcctgacatgagctaggcacatggcaaagttttagagatgcaaaggtaaattaagacccctgtgttaattctcatgcgggcaaagcaagcacattttttaagttgcaataatgcaacaatggtggtgtgtacatagtagggcaaaagcatagagaaagccatggaaatcctcaagccaagttcaaagagtcctctaatgtatggcataccacaacaaggaccttcaaagggtgcatttggtaagaaaaggcaacctccaaagattcatccaatcctaaggtttcatagagtagggacttcttcccttagctggaaaggaaagaagtcatttggtgtgcagtagacataaattaggggccgtccactttttcttgcaatgattcatctaatggaggagcagaccctggagagaaacatatctcttcttgtcttcattttgttcttcttttattaaatcacccacaggacaaccggatgctccagcaatagattatagaaaaaacagatgggtatttctgtgcagtcagaaggctcctgtgcccttttccagcataaaacgtttgtgaaaatcaattttcagtgcctgctgaaccaggctgatgtgagaactagctttccacagttcataatattcactccgggatgatttgacagggctgatattttatcacgaatacaaaggagatgagcaccattctcctaatatattcattacttgtctcaccaccctggtaaataatatgcatatggtaatttgagagacacagtgttcccattgctcttttttattcccagaactctggctgtcttttctaaatgctgcaaatcaaaggcaaagttacctcacgcacctgtagtcccagctactcaagagacagaggctctagaccaggacttgaagttcagcctgggcaacacagtgagaccctatgtctttaaaaaaaattgcctaaaaatttggccaggtgcggtggcccatgcctgtaattggaggaactttgggaggccaaggtgggcagatcacttgaggccaggagtttgagaccatcctggccaacaggctaaaccctgtctctactaaaaatacaaaaaaaaaaaaaaattagccaggcatggtggtgtgcacctgtaatcccagctacttgggaggctgaggcataagaatcacttgaacctgggaggcagaggttgcagtgagccgagattgtgccactgctgtattccagtctgggtgatagagcgagactctgcctcaaaaaaattaaattaaaatttaaaataaaaaattacttaaaaatttgattttacattcctcctattctcactttctggtgcccatacaacacataaattacattcttctctatgtttacctgcatctctagggaacaaagcccctttcacttgttctgttactatagaatgttctacaataccccaataaagattcattcatttgttcatttacaaatatctattaagcacctactgtgtgtcaagcagtatgctaaatcttaagcatgaaacaaaagaaagataaaagtatctgattcagggactggttgttctgttgttctgggtttttttttttttttttttggaagcttgttgaaaatctgtggcatcatacaaaacaaaaaagaatgcaaaactggtgccttaaatagaaatgtattaataatgagtgttagagctaagagaaggcaaaatgtctacagaacacatgatttcaattaacaacagtgagtaaacggatgagctggaaaaaaattatgatcgggcccatgattttttttttgtcgttttttaaaaattttgtttgtttttgtcatactcatattattctaaggcccattgattttagaaagaaaatctgttttataaacttagcatattaaaagcaaatgcatagctccattttcttagaaatgcgtgaatacataaacatgttttactgagagtaggacttaatttatatgtattaaactgtcagaatatacaagttctttgtggtcagtaattctttcattcatttaacaaatatttcttttgctaccatggatcaatcagtcattgttataagcattgggaattaagagtcctgccctcaagtttacatttaggtgagaggacaatgaaaacaaataggtgaacaaatataccagataactagaaattgcaatatgtgccatgaagaaaacaaacgaggtttgtgtgtctgtaaggaggtactttgcataaggtgatcagagggagtcaatcatgatgataggggaggaatgtcagacagaaacagaatatttacctatcgtttccagaagatagtgctgcctggaaaatagcagtatacatttatctaaattacagatttgcaaaatacagccagtggtctattttcataaagttttagaaccatttttgtaaataaagtattttgaaacacagccatacatattctttaacatatttcctatagtcgtcttcatactgcaatagcagagttttatagttgcaacaaagaccctatgggccacaaagctgaaaatatttaccatcttgccctttatagaaaaagtttgccgactctggctctaaattccttatttgcataatcataacttttttgtattttttattttgttgtttttagacttgtaagttcatatcaacaatttatagaaactctgttaaaatatacctagtgaagacagctgacatttattgggtgagattatgttccaggcactcaagtactttgcatgaaatgcattacaggtaatgcccagaacagtcctatgtggtaggtgctattatcactcaagcttatagatgaggaaaatgagaacacagaggttaagtaactcacacagcaagtaaatggtggagccaagaatcaaaaccagacaacctggccatagcactattctaaactgcctctgtcatttaatattctgtaacctcaccaccataatagatctgccgcttaatactgcctatctgttcctaatttgcaaaaggaagaagcatcgtgcaccatcttgcaccaaagaatttagaatttgtgttggagccaaattttactgttattccttgcttagcatttagaatatgaagaaggtttccaagtaatttcctctcaagcttcattaagaagctttgggtagataattggtgctttcaagaatggtcctgctcacactggcaatcaagactgtttctttagatatttagaagtgctcattattaaattcactagataattctgcagccttctctcttgttgtggctataagatgtgccattagagcaaatattgccttcccctttctccccatttcctaaaaccccaacataacttcagcatccccatctaaaatcgccaggtgattccacaaaaatcccggatatgcttggcacaacctgtgcaaacccacctgaaaagtccatttcagaaagccccaattctgtgatattcagttcaacctaggcatcaaacacttagccctagccctgatactatatatctgctaatttctttggaaggtatctatatttctaggttttttgtttggccaacctattcacttctgaataggctgaagagatttgccgaaggttggtgtaagcttccaaaagtcacttgtacttaaacattttcacatccagtgaaaaaattaaacattcgagaattgccattttttccaactctgagtgtgggttatgaatagctattgagttatgacatggtgctgagcagtacctaatcacacaggtgggcaggatccctgccctcacagagtggaggagacgggaaccagttaagagaaaatgaacacgcaatgtaacaagtgctgtcatgaatgcaggatgatagagtggtccaggggcatggcatccaatgaggagttgggggtgggagggcatagtccagaaaggctccctaaagcatagacttagaaggtaaaattgactagacttagagtgtggggagggggaggattggaaatcaatgattcaaggatgacatctggtttcatcatttacatttggttgaactattagccttttttcagtatatgtttctagacacacctgaagttgatacctgtctgttcaaatggccacacattctttcattcttcatggttgcttttttgtttcaagatagcaagaaaaccaatctttcctcattttgccagtaaccggctgtgggattttggacaaactactttgctcagcctcagtcttttcatctccatagggatattgaacaaaattatgtctgtggttctctcctcatctgaaattctaccttttaaaccccttccatgtcatagtgctttcatgacccccatagattcatgcggcatttcccaattctgagccttaggatagtgtgtctgttagaattgtgttacactttgtgtcagttaccaaacctaattaaccaaggacttaagcacattaggggtttgtttttttttttcaggtattaaggaatccagatgtaagcaatacatgaatgatgaaatagccaaacaacagtgttggggacccagactccttctatctttgttctcagtcatccctgttcccaagatagctgccccatctccagcttcaagtctgtactccaggcaagaagaaagatagcaaaaaaggcaaaatcaagggccagctgaattggcttagtttgaaagagctttcccagaagttcttagtggaatttatttaaatcttattggccagaactatgtcataggccacccctagatgtaggaggggaggctggaagatgttcttttttttcagttgggtacattaatatactaagcaaaatgagggttgtactgataaagaagaaacagagaagggatgttagacaggcaactggcattgtttactgaagtttattcagatgtaacattcaaaatatttaaaacagttctggcatagccactgaccaatcagaacagaaactggccagcatgttatagccagctgaatggcagccctgatgtttttctgctttgcattatagttactgtatacagttgtcatctctcctccccccacatcataaggcctaagtccatcaaggacaggattacactttgcatgtgttctttacagctctcaagaaagattcacacagagtaagtgttcacttttgtgaaagagaattaattgttgaattattcaaattgtaatccagggatgagacaacccaaccaagaagtgttcaaattattacctagtctattttctcaggaatgaatgatttatgtgattggtggctgtatcttcccaaattccacaattgattataaacctggccaatacagatggactttgaaggttgctcaaatctcttacagctactcaaaaggattattacagactagaaaaagtattgcctgcagtgaaaagcttcaggaataatagagttcagtagccctttttcttcatttattacattgaataaaactaataaggagccaccccaataatcaaatcaagtcagttccttaaagacttgcatctggttcttccagcctataatgaacataatagcgcatcatttcttttcactcagatcttgagtaatcataatgctcagaagttgggatggagcattatagttaatttaattttcttaaaagcttgaggtcaattggaaaattcatgtgttaattctaattctttaaaaaattacatttttaatgtttgtggtttaattttcaccaatgtaattacttcaaagacttttattttctctacttgctcatttctaaatgatattttaacatctatattttttatttgctctaattctccagtttattctccattccatgcaaatcttgaattgagatgcaagtttatcctaaattattaggagaactgataatgggctaccaagaaaaaatacatacatgcaatatccaatttccaaactggctttggtaagacatatctttttgagaaatcatttccattaaaacacctctcagatgcaaattattctatggagtaataaaagttagactataatgggcattttgtttcattactttatctttaaccttttagtttggttccttttaatatttgaagtatgtgcttacatctgtcgtcttctaggaaaatccctatttttatgtttgtatctggattattttatagtatgtggggttttttctttctaccacacatcttcaattctaagaggaacttttttctttgtttataattgttgaccaggattcattttattattagcacttgttgaaaattgtagggctggcctggtgcagtagctcacgcctgtaatcccagcactttgggaggctgaggtcaggagtttgagaccagccctggccaacatggtgaaaccctgtctctactaaaaatacaaaaattagctgggtgtggtggcgcacgactgtaatcccagctactcaggaggctgaggcaggagaatcacttgaacccaggaggcagaggttgcaaagagccgacatcgcaccaccgcactccagcctggatgacagagtgagactccatctcaaaaaataaaaagaaaataaaattatagggctaatatgtttattcaaacctcctatagctcaactgcctacaaaatttaccttttaactgcatggaaaatattccctctcccatatcaaatttcaaaaagctatgtatttttttctttccttattttttgtaccttttgaccaatatctgtcctttctcctacccctcagtccctgacaagaactttttaaatacattttattatctttgaaattggaatacatcttataattttgggcatatcatgatttaactggaagattttttttcttggtagtaaataaagtaatggcagcagataaaacaattgatagcttcttagatgcattgaaataaagtaatctccaacagtgacagtgtcctttgaagaatttctgaatgatccagaaacctgctgtgaaccatgtattgtttttgactggtgccctattgtatcctcaccaaaatgaagtttaaatctttgaaactggaaaataagacagaataagtatatagatattcttccttttgattctctacacagggtgtttttctcaatcacacagttgaatctcactggcttgtgcctttcacatgactaatgaaaccaaaatgtgcatcattttgaagcatgtcctgttttccataaattccaatctctccacagcaattccatcacaaaacagcaaacaaatcaaaaaataaaaaacttcctgactgcccatctcctcaatgaaaatgttgtggttttaccatgatgacattttctttaattgtggtaaaatacacataacatagtatttactgtcttaactattcttaagtgtacagttcagcagtgttaagtatatcggattgttttgcaaccatctccagaaatcttttcatcttgcaaaactgaaacttccaaagtatcttttaaaaggccattcttactgaagaattctcgcatagaattgaaatagctcatctctagctcttagctatgcagcccttctaatttttgtcgaacattttcaaatagctctaagcctcaagcctgagatttagccctaacccaggccagactggaccactaaatttttaaacattttttccaaactatactctctttaagtatgtgtgtataagaacaaatggctatttcagtctataaaatgaaattaatgaaattaaacattttaatattttaaccctttattttgctttgagatggagtctcgctctgtcatccaggctggagtgcaatggcgccatctctgcttactgcaacctctgcttcccgggttcaagcgaatctgcttcccgagttcaagcgattctcctgcctcagcctcgtgaatattttaacacgttaatatttaagaatgtttcctcctggttgattcccactaaaatgcatgtgtccttccattaaaagagcccaagcactacagtgtcatttccatatctcttttcttgtcttgccttgttatttaatgactgaatgcttctttgacatcagagaataacctttcatgatatgcactcaaatgtgtagatgaatcagataaccatatccttgttaaaggagattattctgaaatatatgaaccaatgggaagacagaatttgtaagacaggaactttcttactggatttctaggaacgctggacctttctggtgatgcctccagcatgtccacaaaggacaggaggccaaatggctgaaactcactgcatgctccttctggtaccctttcagctcctcttatctcttttctgtttggagatcctccatgagattttctataaggtaatgaaagttatgctgcttaaaaaaaagtcttaaaaagtggagaaagttcagacttatttaaacagacctggattcaaactacagtccagtcacttacaacccatgtggtctttagaccaatccctaaccttctccaagccttgttttctttgtgagtagaatgaggatcgtaatgtctattgttatctctgagtcgctgtaaggattaaaaagtagagtgttattgcatgcgtcctcaccctcagtaaacgtttgctgatagtattctgcattagaaattgaagagtaccagacattattgaagcatcactttttctttttttctgtctccttctactcatctgcctctgttagaggagctcaggaaaaagtattagctaggcttttttttttttctttttctttctggaaggcaatagttctcaaagtgtggactcgataccagcaacataaacatcgagtgggaatttaatagaaatgccaaatgtcagaccccaacccagaactgtgaatcagaaactgggggtggagcttagcaatctatgtttcaagccttctaggtgattctgatgaagtttgagaaccactgtaaaaagtagagattcacgtgggctagccagctaaagtgggagccggtgaggttgagggtgggcggaggtagtcagtagcagagacaggaaacgaataggaactgggcctctcaaggaagggaaaccagatctgaggacctctgcagctgcagttgatgagtcttcaccctgatgctgcctctcccatgcatgactcagtcaacttctagggcagtgattctctcctgggcaattttgcctcccaggggaatttggcaatgtctggagacactttttattgtcatgactggggagttgctactggcatctggtgagtagactccatggatgctgctaggcaccctacagtacacaggacagcccctatgacaaaatattatccagtccaaaatgtccacagtgctgaggctgaggaagcctcttctagagattgtcctcccaagctgctcgtctctttttccttcaccaactaaggctttaccttgtacctaagaaattcaattggcttttttgaaccttatatgggttcatacatgggcctcagagagtccacaaacttgcacaattctgttattgtgtatgtatttattctgcctgttggggaagggagctttcatcaaattctcaaaggttgtattctatgttcattctgcgtatgatttccctacctcacattttctgctcattcatcacttctctttgccacactgccgtttttctacttcataacttctcagctgcttctcacattgctgctttcttatcgtggccatatttcccagttcgaattccgaaggtaaggaatctgattatcctgctctcccctattcggacaaagcttttcccaccagacaacctcataggcccctggccttcccacaccacagctgccctgggttctggtcaggtcccccatgggatgaggaaggccagtagggagtcaatgtcacccagaacaaaacatggctgcccaaggcaggctccctcaggacgggcactggctgaggcaggcatcgtgattgccgcgtctaacaaagatggtcagaaaaccctagggttaggttctggctagagaagccacaaagcacctggaaagacaggaagatactggagtcaatctgaaactccagggtgtggcaaacacatgtagaccctcagaagcctaagaggaggttttgcagaaccacgaggaaaaaataactcagggaccagaaataagggtcaggactcaaagcagtggacataatcaggacagaacaggccgaagtgcagacacaaaacagatcaataaaacccaacagctcagcaaaggtgaggcagctgtgtctccctctggctgccttttctcccctcctctctcaccagaagccaacgcgtacacgctgagtggagaggccgcgaggacaagacagtgggacatgcgtgtgctggggaagtcgagaagcaggacaggaggcaggtctgagagatctggtttgtgtcttgtgccctggttctctctgcattccttctctgtctctttttcccttcctcatgccttttccttagctgatttccctaggacagaattattttctttttcggactgaatgataaagaagtatttgtttcctaagtcttcatttcaaaagcaacaggatagaactctctaagaaaaaaaaaaaacacaaatctctaaatgacattaaattacatttttatttatgtagccttgaatggattgttctactttcagtcagtagatttaaaaggggaaaaaaaacatgttcctcagtccaatgttatagatggcttagatgactgggctgcgttacaccagcaccaggaaatatctagagcagtggttctcaaactttgctccacattagaattttaaccctcaggcggcaccccacgccattaaatcagaacatctagggatgggagccaaacagccgtagtttttaaagtttctcagatgattccaatgtgcatcactggagactcactgtctaggaggtgattttaataaagccctgatccttgcttgctttcttgccactttacttttccaccagtagaatgtaacaaaagacaccttttatttttcagttaattaaattaaatcccagttcattgaggttgtgctctaatttcatgccagaaggcaaccagccgggtagttgcttacttcagtcaaaacaacagaccagcattttggcatcgtgtagtcaagcaatgtttttatccactgatgagtggttgttagtttaatcttcaactttgtaacttggtgtttaaatttatccaaacacaactttggaccctggagatatccggacttatttactgcccaccaaccccctcccccactccccgcccttattcaccagagtgaccagaaagcaatatgatcttcacagcgccagatcttgctgtgataatccaaggaaagaggagccatcaagccactcaagcaacatctcagctgctcagtaaatctttcaagagctcacccaagtcccaatctcagcttcctgatttcttttcctctttatatgtgaagggttttgttgtttgttgtttattttttttattttcataggtttttggggaacagatggtgtttggttacctaagttctttagtggtgatttgtgagattttggtgcacccatcacccgagcagtatacattaaacccaatttgtagtcttttatccctcacccccttcccaacctttccccaagtccccagagtccattgtatcattcttatgcctttgcatcctcatcgtttagctcccacttatgagtgagagcatacaatgtttggttttccatttgttgttcattttttaataaacatggttgaaaagactaggctatagtaggtcagtagggcctgtttctgagtgtggtctgttttgccagcacattctcatgaccacttggcaaaaatgagactgtgacatttttttgctcccaacagatgtatttttggtagcccacaggttcttcatttgtttgtttacagtctttaaggagagaaaacatgctgtgaggaagggatcagattgaaaactgcttaatctgatgggaaaagcctgaaacacaacttattgatggtcttcaaaactatgacaggttagaaggaagaacattcaagctagttggtctctatttccatggaggaagtgagcttaaagtgcagttaattgggagtatagtgagccagagacaataactttggaattaaataacaaatttggctgctaagaaagtctatggcatctccattcctaaagaatcagtttgctgtggaatgggagtcagaaatgggtgggttacaattctgctttggtctctgactcaccaggtgttacatggcttttcagggcctgtgttagtcaacattccccagagaagcagaaccaatgggatatatataggtatacatgagaggagatttattatggaaattggctcacacgattatggaggcaagaagtcctattatgtgccgtctgcaagctggagccccaggaaagccagtggtgtaattcagtcttattctgaaggcctgagaaccaggagatctgatagtgtagctcccactccacggccaaagcctgagaacaagagagaggcctggtataagtctgagagtctaaagccctaagaaccaggggtctgaagtccaagggcaggaatagagggatgtcccagctcaaggaaggaaaattttcaccccttccatgtttttgttctattcaggcccacagtagattagataaagcccacccacattggtgagggtggacattctttactcagtctatggattcaataccaagtgtactgggtgtttctcccagaagcaccctcagagacacatcagaaataatattttatcagctatctgggcatcccttaacccagtcaagttgacacaaaattagccatcacagggtgtcagcatcctcatctatcaaatgagaagttgagctggataatccccaaagtccctcattgcatacgaatgtcctatgatatttaacaataggacatgtagccttctgccttgagaaatttaggtactaacagaaattgtttccctgaggtcccttcaacttcaacaatttagagtaattcaccaatgtgtttcctattttgaataggactaatgtgtttcctattttgaattgcaaaaaatataaacatatccatatttgataccaagaaattagtaattctgttggatgtgaaaagaacacgggttacataagaatatggtcataattgctagagatatatactgaaataggtaggagtaaaataacatgatgtctgggatttttttaaataaaataatatatatccagatttcacaagatttcctttgggctggaaaggtttctgaatatagtgcctgtgttctagaaagaggggtcaggagcctagagtatgcagatgttgatggtattgagtgttctgtacacagaaccaagagactagagactttagagaccacaaaatgcttttcctaaagacctagaacatgaaggtttaatttatttccctttttctcctccatgtgttttggataggttggtaagtggaaatcaattacccctgaataaaatagaaaccctgagagagataagtgacttttctggggatacatgctaatgacaacatcaaagccagagtgaggattgaagggtgaggtactatgactacctccctctactcctccttcccctcctgctggggaaatgccaaaggtataagtatccttttggcaccatttgtcctccagggtttctgtgtctgtcctgtatctccttattcattcttaaaactctttctagtggtcagagctctcctttaaagaaagaataacaagacatcatagcagtgaactcagagcactatcactggcttttcacaggacatgagcaactttctcactggaggggtcagggatgcttgtatggtaggtgctcctgactgtgataacttcacttgagcctaccctgagaatgaccctgtgtggcagatgcacccaaatatatgttcagagttccaagctaaggaattggaagtggccatcccagagattcattccttatctatgaggaacatctgaaccccagcccgtcccagggaatgtgggccatacaggggatcagcatcctttgtttggggttaaatgaaggttgccaggctgaggttgctagggggagggtgttaagtgaaaatgttttataaactgcatgccttttgccagcgattgtggttcttcttaccagcccactgccactggaccagcagttctcctgtccagcccgccaccactagaccctctcccctgtatgtaaacccccagtaaaaccccagtgtctcattttctagctctggatctcttcttcagcctcttgaacctagtgccatcccctttggagttgatagggattcagcacatcactgctacactagaataaaacatgtgctgtgtccacattaggccaacaaaatcccataccatccaacttttttcactgattaaaaatactattaaattttaaattggttcatataagaagttgcagaaaaggtgtttgtaggcaaatccagctgactcacatataaatcatctgtattagtttattagggctgacataacaaagcaccacaactagatggcttacaacaacaaaaatgtattttccgacacttctagaggcaacaagtgtggaatcaaggtttcagcagggccatgctccctctgagatgctgggtggagtcctcccttgcctcaccctagcctcttgtggtggcagcactccttggcattccttggcttgtagctgcatcactccgatctctgccgctgttttccaaggtgtcctccccgtgtgtctcttctctgtcttataaaaacatccgtcctattggattaagggcccaccccactccattattacttcatcttaaccaattacatttgcaaggaccctatttccaaatgaggtcacattctaaggtactggaggacttcagcgtctctttcgggaggatgcaattcaacccataacaccatccaaacaaatgacattatgagaaggtttccatttttgtcctctgttgtggttagattcctgattttacataatttagagctaaaaatttacttcctgtctgaaaagtgatttttgacaaggattgagatcacaactcgagttctgtggccattgcttgccctttcagaatcacttgtcccatcctgtgtgccatgttccaaagaagccaggtgagcagatgctggcgacacagggatgacagcatagactacagctttaagtgaaagggactcatgactcaaccctgtagcttgcccttgctatggttgccccacccctcccaactccttattcctcctgctttgctgaaaccacagctgccttgaatcgagccattttgattctgccgcaaatgagctgtaaaccaaatcaagccacatcaaacaaatccaaccaccatcaaaagcaagttagtcaatttttgttttctttgcaatggggaggggtcataaaagccttgtatatcccagggcaaatattaatctgtctgaagagtcagcttgccaacgggtaatcagcaaacaggttggtgctcatgagagctgcacagactggtagttgaggatattcggtgccaggagcaaaccccagcaggcacccttggtaaatctggcaggctctgtgacttcaccctctgcattcggaagcaagcattcaaactttgacaggcttgcgacatgcccagggtaagtcacctggcttcttggattctggacagatatccttgtgccacaagctcacttctctttctctgcttcaggactaggtccttcaaggggatagcagagaaagcatgtttgcagaatccatgccttgtgcccactcccaccctactgcttggcacttttagggaaagtgggaaggagtaaagttactctgtcactggcagaggagggacagtaaagggaagaagaaaatgggagaaatgagaaataggtacccaatgagtaaaaaaaaaaaaattgattacagtgcttaaaacctatcactacagtggtgatgtttctgaatgatagagagggtggatttggcaaagcttctggaatcttttcagacttgaggtccacctcctgtcttgagaccagttaagtttcaaccccacatttgctgtggttgatcccttgacctttgtgtaaatcctcccaactttgttaggccagaggaatgtggagtaagggttctgagttgtacagttccacagtgactcatctggccaataccttaaggatgcaggaaatctgagcagagaacaagactccctcaatatttagaaactggattgagatttcaatccaaaggatacaatttgcccatcaccttagttgcttgtacagtaaattgagcacgtcaataacactaagagaactttttctcttgatgcctaaatgccaatcacaatttttcttagttctctcaattggcatcctggttcctgtctcactcctactgtagtgcacacttacagaaatgaaagctgcctacataaccaccaccagcatccagaaaggagagaatttgacaccatctctttttatctccaccagtttctgctttttagtcattaacaaatggctctggttccctttgcagtgaagacccacagaggcagaagtccctgctctgagtcagttcagctctgattttgaacactgactgggtgctcagcagtaagggttgaaaggaaaaagagggaatacggggaaggaggcagagatggagacagatttacaggtcttgcctgagagttgtgcttgataagcagagagccaattatctctgcaactccaccttcccagcagtcaaatacttgatgggcaggttaaaaagtgaggaggtgaggacaagattaattatcaagtctcagaggaggtgaatgaaatgccttcttgttcattgctatttattcaaaaagagctgctgaacatgaaagaatattatcatttttgcaaataattagaggaaataataggcttgtattttttaagcagctttattgtgatatactttatgttccacaaagttcacttgtttaaagtacagccagccctttgtattcgcaagttttacatccatgaattcaaccaatcaaggataaaacatattctgaaaaaaaatgataatacaataaaaataatacaaaatgtaaaacaatatagtgtaacaaatattcacttgctatttacatagtattcgcattgtattcagtattataagtaacctagagatgatttaaagtatatgggaggatgtgaataggtcttatgtaaatactacaacgtcttgtatcaaagacttgcgcatctgtggatctggtattctagtattcattagatccacagatgcgcaagtccttgatagaagatgctatagtatttgcatataaccaatttgtatgtggaaccaatcccccatgaatactgagggacaactgtatacaattcaatggattttagtatacagatgctcctcaacttacagtggggttagatcccaacaaactcattgcaagttgaaagttaaaaatattgtttaagtcaaaaggatgttttcaacttatgatattttcagcgtatagtttatctggacctaacctcatcaagaagcaggttgaatgcctatctcttttgcaccctcataaagtcaaggaatcatggaactatagtaagttggagaccatctgtatttacagttgtgcaaccatcactataatctaattttagaacatttcgtcaccccaagaagtacatgacagcaatcactctccactcctttttcttcctgatccccagcccctggcaaccactcatccaccttctgtttccatagattagctttctagacatttcacgtaaatggaatcatgctatctggggtctttcgtgcctggcttctttcacttacgatattgttttctgaggtttattcgtgttgtagcatgtatcagtgcttcctttttttctatggctgaataaaattccactgtagggttataccacatttgtatatccattcatcagttgatggacaacacactagtattttaactaaagagcaaagtgccatgatctctttaatctgaattgtacacctttttagctgtacatgagttactatgacagtttctgatcttaatatcttagatttaagcgtatttagtattgataataaaaatgacttctgtttaagtttgtggagagttggggtttgcaggatgatgtaatggtgatagcacaataatgtcatgatatttacatctgtgtttttcaactatcttaatagagtgggtctgtatttaagactccattcctcccttctaataaaataacatttgaatgactggagttttcttaatggcatgcacatggaacactgcacctgcagttgtgtgttcagctgacaagttcacagctgagtgtgaagccaagctacagcaggtcttccaggggtctacttgccacgtggtcctgtctgttggcatcagatttgcccttcacagcttctggcttaagtatgaatgagaaggcatgaaaaagaggagggactgggagcaaggagttctgcaggtcttagaatcctccctgggatacatatttaggcagttcttactccaggtggcaaaaccctgcacagccattcttcttacatgaggagtagaggccgactgaaggctctacgatcctggcatggccatctcctatctttgggacattgagccagtatttagcccatctctttctcatcagcaagtgaagataataatggttcttatttcctagagatgttttgaggattcccataattcctggcacgtaccagatgtccaatcaatgttagctgttaataatcattagcatatattaattacttgctatttcctagatactgtgtacattcacaatcatccaaaaaggtagcaaaaggtagcaatagatatttccactttacaggtgaagaaataagactcaaggaacttacatgccttgctcaaggtcacaagactagatagtggcacaagtcgtatttagatcccttttggtccgattcagaatcctatacacatccagtgaaccatgctgcctatatgtaatgaatcgggtgggccaatattcacacacagtaacacaaagaaaaaaaatcctccaattttttaaaattaaaatgaatgattgatgcaattggactactttggaaaataatgtcaccaaaaccgatgagggggaaataaaagtgagaacctgggatgaagcaattgggacaaatttgggccttaaagaatctcaaagcacattatttgctcaatgctataatcttcccagctctggggagccagatcccctggcttatggagaccaaaagaaactacacatggcactctcgggctaaaaaacagtacatggactcatttccatcagctagagatgagtctatttgcccatgctaatatttcagttctcaacttaatagcttaagatgttcccattatcaacatcacttacctacccacagcacttttaaattagccttgggaaaaatgagtaaacagaagcacagtttatcattctgccaagtgcagctacccctgaagaaggcagctttggatagcaaaacagacaactagattgaaaaacagaagtgtcagccttgacacatgctactaatttgctgcttcgtaagggtcatttgctgtgttgcccaagagtgagggagaaaacagttcaaaggtcaaggacaaatggcatttagatgttccccaaccaggctgacataattggaaaactaaaacccatcgcctgctaacattcccctctcaacagtcttcctgattatgcagtgtaaaataggaacaattttggctactgatcttaaataatcctaagccctggatactaagaccaggaaatatgtattctcttatacttttagatgttctcaattgaaattaacatgaacatagcaattttccactttaattaaaagagtgtgttctttttccactcatggtattagtggcttcaaatgcttaaagaacctttacagaaaaccccttatggggattaagagatcaggacaaagataacattttaagaatgttcttaatattgcaatgaattgggaattattttttaaaccatttcctttagaagtctaaacagtgtcttttcatcactcggaggtattttttaatcactagttcccagttcactttaaattattagtgtagccctagcttgtaaatgcccctcaccatcagggaaagatggatttacactcatgacctctgaactaaactaagcagaaagtcatttcgttcaggtccactgctggtggccacctcatccccatgtccaacccatcattgtcccaatcaagatgatcgttggccaatttctacagactcacattcaggccaaagttactcactggactggaacaaccacctgtgtttcagtgatgctgatttggtcctctcatgcttgtaaaatccagctctaaactttactgttgcttgctggtcaatcaaggagacttggactttgcttctttttaaattatcagtagtgttatttatttacctccaaaaggattctaagtaacccactctagatatagatctgctaataaccagtactgtggccttggcaggttataacaataataaaacttctaacttttcagagtgtttcactgttacaaagcacttccatacaccttctcttgttaaagttattaccctcagagaacaccaattgactgatacacttctgataaagatagcagatgaaaaacattttggaaaataagggctctggacaaattcaaaggtaaccctgttaatctattgactggtgggcctagaatttcagggtgttgatccaactctaacttcaattctggctcccagagaagtctgccatcatggttatttgtcaagaacgagaggtcagaaatgccaaaaataggagttagggtgagtattctgtcaaaaattcgtacaaggaacttcttttataaaataaataaattaaggaatttggcctggatgtcagtgcctgcaaaagggacttcaatattccccagtagattactataaggatatctaaactctggactaggggttatagactacagataaaactgtaagcctcctgcctcctacagtcatagcatttcggagttgaaagtcccttttctggtcttgtagccctgatccaagttgctaacccctctaggattttacgttgtctcagcataagcatgcaccatgaggaggagctcacctcctaccagagtggcccatttcatccttggccgtagcaatctattgactggtgggccttaaaattaaaaagctactttgccttgtaatatgacccatttgttttagctctgcccagccatgggcaatcggaatgtccggtaaagaactcctctaccattttactgaacccaaatttgccttaatgtaatttccaccagttggaaggtctctcttcttgtgcctttggatacatttttttgatgactatagcagccctgaatgatttcagagacagagcacaaagctcctgagagctagtacattgtccttcccagtcttaacttctccttgtcttctatatcatctatatctttcccttttcctctgacatcttcccccagctctgttataattctttcagaaattaaacacaaattcctacatggaaggcagaggaattcagtgaaaagagcagaggaacttggtccaatccctgacaagtttccacgtttaaagcctcataaatactatgatttccctgatgggggtgggagggtagaatgacagactataagtgagtatttattataagcgtcaatgtactataaagctactgaatactttaacagtaaattctaaaagacctcaagcagcttagctccttgttttacatcagaacacattaaagagagaagcagcctgacttttccaaggaccacgggaccagttagagttagaaacagaacttagattttctgactcaaaatcccttgctccctccactgtctctctgttaaacaatgaaatcaataacatcatccaggcaaaggccctagaatagcacccaacatgtattaggtgcccaattattataggctgaataaatatgtgagtggacaaatcagtacatgaataactaggactcattttcaatgatgacattatacaagttccctccaaatgtcacttatgtttttagtcattctttaattagctccctattaagaagcttggttctcaaagtgtacttatgaagattaaatgaaataaagcattaaagtgtttagaaacaatgtctggcagccaataaatgttaactaattgctgtctttctgttttttagccatttttaaaagtaagattatgctgatgctgtcaggagtctctactctgaaaatcactttacaatccactaacgaaaggaattctggaattgcaaaaggattactactatttgtcaattcctatccttcacctgtaactaggccacccacacctaccccttgtagttggcacccatcaagacacaaacaaaatattggattctttcgcttcctcatctgggcttgtgtttactccacccctgacctttgggcactgtctcccattcccagtcaacacttgccaattggacctgacagttgacttgactttaccctatttatcttgctccctctgtctccatctcaatctcaatcaagattttgtaattcccctttggttcctccactctcagccaccctggtacctctactcctaaacaaggcccatgcctttgactcaagtggatgtgcttgcttctgctcaagttcagcctgccccaaaagagtgattcccaagtgctttattggataaacttccttttcattcaagagctccacatgcatgtctataaattgccatatgtaatctctatcaattgccagaaatcttgcagatttctttctgaatctgagtttatctgacaatttgtcaggactaaagactaacattggcctaacgtcagtttatctgacaatttgtcaggacaaaagactaaccttgggctaatgtcagtaaacaagaaagagctcaggaacagaaaaccaaacaccgcatgttctcacttataagtgggagctgaacgatgagaacacatggacacatagggcaggaggttgggggaacaacacatattggggcctatcagggcgtggggagggagagcatcgggaagaatagctaatggatgttgggcttaatacctgggtgatgggttgatctgtgcgcaaaccaccatggcacatgtttacctatgtaacaaacctgcacaccctgagcatgtaccccaggacttaaaagttgaagaaaaaaaaacaagaaagaacttcagtaaattcatcaattaggtttatacctgtggttctggtgtggacaagaagtatttattatctttttaatctccatgtcttgctaaattcatcaattaggatgatatctgtgattctagtgtgacaagaaatatttattgtctttttaatctcctcatgtcttgtgatgaattaccatgtattattttctcatttgttaattgtgtatcaactcccactttattccacccagaatgtaagtttcttcagagcatggacttgacctgtttatatccacagctctatcatcagcacctaaaatactatttggcaaatagtaggcaaccaattgttattggttgaatactgagtgaatgaaagaataaatgaatgacccagaagcagaatggaattgtggttggagcacagcctttggcatcaaagagatctcggttcaagttttggatatgcaacttcttagctatgagtcttctctgaatttcagtttcttcatcaataaagtaggggtaataatagtgcctacctcatagattttggggagcattaaataagataatgcctgtaaggttcttagcatgatagctggcatattttaagaacttagtaaatgttgtgtattattttcggtgaaagtcctcaaatgttgaagcttatcagaggtaattgaattatttaatatggctggtagtgatgattgtactaaagacaaattagtacaattagtctgtcagcaagatttgatttaaagagtcaggctgacaaaaaaaatgtattggtcacacccaccatatttaaagcactatactaggctttcaggagggggtgggatgcaaggatggatatgacacagccccttccctctaggaacgtagaactgagaagatttactatgtgtgcactgtaccatgctgaagatacagaaatgtgaggcagtgttacctcccacatcatccaacttactctccatgctctgcagaaaattcttctaaaacactcagcctttgctttgaacccctataatgacaagaaactcactgacttatgaaacagatgattctctttgggaacagtagtcaccactagaatgatcttaaaattagcacaaatctacccccccatggtttttacacattgatcaaacttctgccttctgggcacctctagaataaattcattttgcactcttctatcagaggtcagcaaagtaatgcctgcaggccagatccagcctgtttatttatataaataaagttttattggaacacagccaagcttattcatgtacatgttgtctacggctgcttttgtactacagtaacagagtacttggaacatttcagcctacaaagctgaaaatatttactatttggctcttgaagaaaaactctctcaacttctgctttatgtgacagaatttggagataaacaacatgctttttcctaaagtgaggagcagggaaatgagcacagtactccaagtgggagctaatgtagaattcacagaactaagtagtactatcacctcccctgttctggatgccatacttcaaataatgtgaccagagatcaggttggtctttgactgacacacaatactcaagtatataaaagatgaaatctgtgagttatttcccccaggagcttctattaaattatgtctccccaccccataatggtatatcctcatgttgggaccccaccccataatggtatatcctcatgttaggaagtatatacaaaattttacacctttcttgcttgtccagagcaatcaggcacaatttagcacatattcaagggccatcttagggtcagacagaaaaaggatggcacgcgcagctaggattttgaagagaatgtagagactctttacatgcccaggggtagggttagaagaacaagggaatttgtcacccccctatctgcataaagaagagtggagagggaagaattttgccagggcccagtgatagctggagtcatgactgcttaactagtcttgtggtaaaagatacacaaccacggctagcaccactctctgaggcagtcagggagggagggaaatcgataccctgatatgcccatctccatgctctacccactgtgggtagaaccctacttgaagctggagggcacaggagtcagactcacagggcacagagcaggtaaagaatagacgtgggagccagggcagaggatgacaagggctaagtggtaagccaagcatttcctaaatgctgaatgaatagtagatgaatggaccaagtgggcccagggcctgtcactcaataagtgtttgttgaactgcagaagccatccctttatgcccgcctgccccgaagccctcactgctgctatctgctgttccagatgtcccacccccagcacagcccttgtcctggttctccactccctcgctgacccctcagtgtttctgccaagagtgtaaaaacagtctggatcttattttggagatgacagaacggagcaggatttgctctgaacagaacaggacaactctaatcaaagagagaactttaagttctaaaataattcttagaatctaaaatttttttaaacagaaaatttggtgtcactgcaccctatggagaaaaatgagtggctcctaagaaacgtgccccagacatctgtgtcagaggctctggatccaacagaccccttattatcaaatgccttggggctggctgtcttatgctcagatggcccttgtcacatggtagcctctgattgtaaagacttccaggctcttgattgatcatgccaacagcagcaatgttgagaaagtggtgtgtgtgtgtgtgtgtgtgtgtgtgtgagagagagagagagaggttgtcaatggcatgagggtgctagtggccaaccacagcttcctgccagtcacctcctcctctgtccattgagtcagcatggaggatattcagcactggcttcctcaaggaataatcctgaagattctggattttgaagacttagaaaaagcattattttgtctgctactctggttagattatttgcctttgcttggaatgggcaagacaaaactggacattaaattatgaattgctgttcatatatatcgaagcccattttaaaaagtagctgtaggttgggcatggtggttcacacctataatcccagcactttgggagtacgaggcaggcagatcattgacgccaggagtttgagaccagcctggccaacatggcaaaaccccatctctactaaaaatacaaaaacttcgccaggtgtaatgacatgtgcctgtagtcccagctacttggggcagggggcgggtgaaatgggagaatcacctgagcctggggaggttgaagttgcagtgagctgtgattgcgccgttgcactccagcctgggagacacagtaagaccctgtcaaaaaaaaaaaagatccatacctctaacagttgtcccttcatgcctccgagactcaggctagtcagtccccagagtctgaaagttcttatacaaaacccagaattccagttcatctataactatgtcagaatttgttaagaaatttcattaaagtctccaggaccaaattttatgaaatctaatcccaactaggataactggcaaaatttgagtaagctctatagattaggtaataatactgtgtcgatgttaattttcctacgttaattattgtactacatttatgtaggagaattgtccttgttcttaggaaaacacactgaaatatttaggggtaaacatgcatcatgactgtgactagttcacaaataattaggaagtaacttttatatacagagaagaaagattataaatcagatgtggtaaaatagtaacaattgaggtatgtgggtcgagggtatatgagattttttttttttttttactattttataacttttctgtaagattaaaattacttcaaaataaagctgccaaaaaacaaattccagaacactagagctgtctcatgcctatcactgaggggccaatgttcagccatgctacgtactgcagagtgagccagaaatggaatctcccgttttgtcatcttggagctaaaatgaatcatttcctctttcagctaaagaactctcctattcatggaggcgaacactgaggatgctttccacatgaaccctgaaggtaagggggacttgttctcatgcccctcggtcacaccacccatctgccccactgtccgtttcatccagggcaggggctcaactatcttggtttacagaatatcatctcaaaccagtcaatgtctacactggcacattctgctgtcttcaaaggctgtttcagtctccccagcctgtccagctcagaaaaactgatgttcatccttttctgtttttctcaaagaaaataccaaagcttttaatagctgatatctcctagtggtgcaatcatgagagatttttattttctccttgtagttttctgtaattgagagattatcgacaatgactatgttacttctataatcagagagagaaatattgtgcttgcttttattttcttaagcaactctacataaattcttgccacaactttctgggccccgtaatgttactgctgtgtctccttcctcccagccctcatggcaggactcatgtgtgacaggctctgggtcttctctcatctgccagtggcaaggaaaccctaggctgccaggactgcttagcaaatagatcatgaagtattacgactccattttacagatggagaaaccaagccccctgacttccctctgtctacactacaggcaaatgggatctggacccactgagatgagctcgacatgtacgactttgaggctgtactctctcattcagaggaagttaaggagccaggaagataggaaaacaatgaagttattggttgaagaaaatcctagacaaaattttcctgggacttcttggggccatctagggaaacttactagtcttcccacattgaaacatgatagccccttgagagccatcatgccgctttggtgtcaagttctgagcctgaacttgccctctgggccagggtttctcaaacaacagtgtaggcattctgggtcggatcgttttgggtggtggggctcctctgtgcatcatttgatgctcagcagcattcctggtgtctcccactaaataccagaaggacaccaccccaccccagctctaacaaccaatgacatctccagacagttccaaggaggacaaaactccccccaacagaagtaacaataaaataatgtttccaggctttgccaaatgtcttccaggtggggacaaaattatcctaccaaaaaccactgctttaagttgcctcagcccagcagaagcttttgtttttcatggaaatcgactgaaatttatagtgttcacaataacattagcaaatacttgcagaagaagtgtcatcagtcatcaaaacgctctgggtacaagagtgccccacagcataatagccctgcccaggagcatctggtaacattggaagtggtgaatcgacccattcagacttctctgtgctttctcccgtcttggcttctaccccttcatgccaaatgcctcatgctatttactggaaggaaaggcaaatgaaggagaacagggcaatgctgagtactgagtggacctttcctttaagagtttgaagaggtcagaaagcacccagtagtcagagctgtgttgcaaagctcccggaaaatttggccgctactttgtatttgtgtgtgtattcattattcatagacatgtattcatagacaacattattgctcaaaagatttgagacatattctccacttcactttatataattttaactttttacagcaaacaggtcaccactctaaagagtggcttaaccagaaatccttttttaaaaaaaattaaccaaatagtataaagtagataaggtggcagtagcagatttatctgtggtaccaattggcaaaccaaggccctaaaaggaaattccaaagccctagggtttgtacacacacttcctattcatctttaagtgcacctcatggaccttttattcctctgattgatcttccctgacccctgcacccagcctccatcatcctccaccctttcccaacctggtgtttggattacaaagatacttctgattccagtggctatctgtgaaatcacaggcaggaacttgaaagcagttgcatggtcatccaagagaaacagaaacacagctcagtttcagggtgaaaagaacatccagaaagcaatattcatagaagaattcagagggggggaccctccttaaaagaggggattaaaagttaagagtaaaattgcaattcctgtccaagacttgacccaaagtgccgcagtccattttgcagccttttatatgatgtctggtctctctaacttaattgttaactttccagtcctgtcccagtggtaatcatcactccctaacaatcactccctcgtgccccatacccacccagggtggaacaaactgtctttgcctggcataccagattcttttgcaagagccctggcatccttcaggctctgcccattccaaccctcccacctccagccctttcccaggcccccatccgcacacttctgcccttaactctctccagactgcaagaagccaagaggagattagaagcagcccagggtcctcgggaggatgtgtccacccataggctgtgttttgaagttcatttaaagctctatacttataatatttttccccaccacttacctgttagagtttctcaaattcctatcatttgagtttctgctttgactaaattgtggcattactcaaaacctacacatgtacctaagggagaaaggccttaatttatagacagcaatttgtttatgagattgtcttgctggtgcttctctaagaagagagccttgggattgggacacaggacaaattaattttgattgcagtggagagactgaaacgattgggatattgagctctagacctgtactgtctgatacagtagctacttgtagcaatttaaatataaataaattgaaattaaatgatattaaaaatttcatgcctcagtcacattgagtacatttcaaatgtttgccagcctcatgtggcttgtggctaccaccactggacaaaggaaatccattggacatttctatcgtgattgaaagttctactgaataccatgtcttgagactgaggctggtacttccagcagagagttctggaaaagaggtgcagcccaacatcaccagctctgtgggcagggatagagaagagtagaaggaaccgaattccaaaagggaagggagccaaagctcaggcccagccctgagcaaacatgcatctgccgcacccaaactctttatgttaacaaatggaaagagaggagccactggggtcggctttgtagcccatttcctccattggatggcctctgagttctgtgggcttctgatgaagcaaaagaccccatcctgaatcctgaggcaagagggactcagagtttcactcacatacgggagccactgggctcccacacaaagggaaatctccaccctagtgacacaaggagccaggcagtctcccggagcccacttagagcaatgagtttccaagtcaaaagacatttcaaggaagaggagcatcttgtccatctgaaattaggcctccactcagaaaaatctgaggagcctggagggttccaaggagcaattgtaaccccaactgatgatggtggagcatttatcaagccttgccaatgacagtggttcacgcttcaatagcactttgcagccatgtggcatgcttgaacaaaaatatcatttatttcatcctcacaacagttgactgaggaaagcagggcacatgtgaccctctcgacactttacattaaaagatactcatgctcagaaagaggaaaagacatgccaaattcaatgtggctgatgaatgacaggaccagctctagaaaacaaccacctattctgtctctctcaagcgatggggttacttggtacctgtccaagtccctaaatgtgtcagctccaaagtgtgtgcctacccatggatcatgctgcaaagtcagttcacatccaactccaagctgacaaccgagcccttgaagacttctgctaggcctcaatgtcaagaacattcctaaaccaatcacaggcaaaaggcaagtgagatcaccatggttagcttagactgatacctcctcatcccctggggctagatgcctgatacctaacaaaactagatacctaacaaaaatgaaggcagaagtgggtgttggagaagcaaccagcagtgtctgccagacccagctatactcagggctatgataaagaagaggggctttctactcctccttctcccgaagcagcctccccaggcaacccctcctggcctcctaggccaggtcaaatctgcccgctatgggttctcatggtacctgcaggggtcctccttagcacttgcatcatttacattgaactgttttattagctcctctcttcaggagactggaagtactaggaggtttgtttcagcaaaacattgtattcttaggaccctacccctgcatcacagatgctcagttgatatttgttgaaggattaacagatgggtgggtggtagattgatgaatggatggatggatggatggatggatagataaatggatgggtggatagataggtgggtgggtggatggatggatggatggatggatggatggatggatggataggtgggtgggtgggtggatggatgggtggatggatggatggatggatggatggatggatggatggatggataaatgggtgggtaggttgatagatggatggaaaggtgggtgggtgggttaatggatggatggatgcatagatgggtgggtggatggatggatggatggatggataaatgggtgggtggataaatgggtgggtggttgatagatggatggaaagatgggtgggtaggttaatggatggatggatggatagatgggtgggtggatggagggatggatggatagatggatggataaatgggtgggtggataaatgggtgggcgggttgatggattgatggaaagatgggtgggtaggttgatggatggatgggtgggtggatggatgttccagccactacataggtcaactctacattttctcaaaatgcattgtaaagagctggatcgtggtttccctccctcttccccacaagttgctctgggagtatgaattgccccactcccagaccagcctcgctaagggccctgactattaatactctggttggacagatgacttttctgcaaagaaagggctcctgagggaagctgaataaaatggggaaaaaaagaatgaatataagccagtaagagagacaagcaattatcttgctagataaatagcccagatgttttgaatgaagcaagtctgaaagaccatattgttcatgagaggtgactaaatcaggtagacacaggctgtattggtacaagatggaccaaagtcatgagggagagagggactttgggactggtagtaatgtcaggaggtggtagggatgctcaaacccctggcaataggcaaagaagtggagttttcaccttgagcccagtgctttccctcccctagcccacctgcctttgaatttccacatcctcctgctttctcctctttctctaccctctttcccggtttaccactctttcaatttccggttcctcttgctttgcatgacaaggactagcagaagccccggggccagagtaaaacaagcacccagcttctcagagagagccctactgaatttattaaacgcctttttaataagatgacccagcccttctttgaggctctgaaaaatgagtttttcaatgaaattgccttttacccacttatcagaagtttaacaaaaaataatggccagccttaggtatttcaaataaccctaagacagacacagtgatggaattcagagaagtaggggaaaacaagtgggcaagccatgagtatcaaaagcattttaaatcattcaacacaggctaagaagcagggcacaggctcagccattcaccctgattaacacagggaggtcggctgtcagcaactgctgaaaattttgccacaaacatacaagtaatttctatcttctaacctagaggggagcttttccatgtatttgcaccactgaatgccaggttttcatttgggagttgttttgtggtgttaaaattttttgttgggattttcctcctcgattacgatagtaatagctttttattttattacaaaagtaatcacattttattttagaatcatcctcccagaaacaactactcccaatatatatttccagtctttcttctgtgcacatatagagatatgtatattagattgggatcaaaaacatctactttctgtattcaatttcttttttactttttccatgtttctatatcattggtttatcacattactttaaaggttaaataatatttcattatatgactgtaacacgatctaggtaaacaatcccttatggtttgatatttagatctcttccccatgattctgtttttataaataccaaaatgaaagcagaatattggattctagaagtaggagggtagggttctctttgtacagaattgtttttgtttctgttcatttgggataaatttctagaagcctattttgtgattcaaagtgtatctacattcttacggcttttaaaatatattaccctaaaaggatacaccaatttatattcaaaagataaaacatctgtcccacctctaccatctagcagccagaagtgtttacaaactcagtgttaccatccagaaatctcacggggttgggaagagaattaaataaaatattttatatgaaaatactttgaaaactaaaattgtattaaaatatatgttgccattattatcaatttttaaaccatccaagatggaaaaggcattacctccctcaatcacatattccaatgattaacagctctttagagcataaaattcttaccagttgccctctaaatacaactacaccacatatatttcatttattcagaaccatttattgaataccttctatgtttccagttttgcattaagcatgggagatatgaaagaaacacacacacacagcaatgagctactagcctgggatggggtgggggtacagagaaagataggtcaagattcattatcagtgccacggtaaggtcaggttctgggtgttttgtagacagggcatgatccagctttggagaacccagggatgtccatgcctgaaagagggtaatctgaaagttagcatgagaagcagcccagctttctgttgggggacaatgtggcaattcctattgtttctgaaacagtatggagaaatcacattttcctggcagctatattcctgcatagaaagacagcaatttttgtgggaaaaagacattaacaggccacatggtgggaaggctaagattccccatggggttgactttgaggaacactagatggttaccatgtctctagaaatgagcctgctcttggtgagtgagatatgcaagctgatgctgattgcaggattgcttgggactatagagagaattttattttattttagaggggattttagagcggtgtgaggaaagatgaaggggcaagatatgacaactgataggggaggaactttgagggcaaatacaaagatgcttaataaggaattttgccaagtgtctgctatgaaatgttctatagagcccctcactcctgtctactcacaatatccttgctcttatttttttttattatactttaagttttagggtacatgtgcacaacatgcaggtttgttacatatgtatacatgtgccatgttggtgtgctgcacccattaacccatcatttacattaggtatatctcctaatgctatcaccccctccccccatccaatgacaggccctggtgtgtgttgttccccaccctgtgtccaactgttctcattgttcaaatcccatctgtgagtgagaacatgcggtgtttggttttctgtccttgtgatagtttgctcagagtgatggtttccagcttcatccatgtccctacaaaggacatgaactcatccatttttatggctgcatagtattccatggtgtatatgtgccacattttcttaatccagtctatcactgatggacatttgggttggctccaagcctttgctattgtgaatagtgccgcaataaacatatgtgtgcatgtgtctttatagcagcatcatttataatcccttgggtatatatgcagtaatgggatggctgggtcaaacggtatttccagttctagatccttgaggaatcgccacgctgtcttccacaatggttgaactagtttacagtcccaccaatagtgtaaaagtgttcctatttctccacatcctctccagcacctgttgtttcctggctttttaatgattgccattctaacgggtgtgagatggtatctcattgtggttttgatttgcatttctctgatggccagtgatgatgagcattttttcatgtgtctgttggctgcataaatgtcttcttttgagaagtgtctgttcatatccttcaccaactttttgatggggttgtttgatttttttcttgtaaatttgtaagttctttgtagattctgaatattagccctttgtcagatgggtagattgtaaaaattttctcccattctgtaggttgccagttcgctctgatggtgatttcttttgctgggcagaagttctttagtttaattagatcccatttgtcaattttggcttttgttgccgttgcttttggtgtgttagtcatgaagtccttgcccatgcctatatcctgaatggtattgcctagattttcttctagggtttttatggttttaggtctaacatttaagtctttaatccatcttgagttaatttttgtgtaaggtgtaaggaagggatccagtttcaactttctacatatggctagccagttttcccagcaccatttattaaatagagaatcctttccccatttcttgtttttgtcaggtttgtcaaagatcagatggttatagatgcgtggtattatttatgagggctctgttctgttccattggtctgtatttctgttttggtactagtaccatgctgttttggttactgtagccttgtagtatagtttgaagtcaggcagcatgatgcctccagctttgttcttttggcttaggattgtcttggcaatgtgggatctttttttggttccttatgaactttaaagtagttttttccaattctgtgaagaaagtcattggtagcttgatggggatggcattgaatctagaaattactttgggcagtatggccatttttatgatgttgattattcctatctatgagcatggcatgttcttccatttgtttatgtcctcttttatttcatggagcagtggtttgtagttctccttgaagatgtccttcacatcccttgtaagttggattcctagatattttattctctttgaagcaattgtgaatgggagttcactcatgatttggctttctgtttatctcttattggtgtataggaatgcttgtgatttttgcacattgattttgtatcctgagactttgctgaagttgcttatcagcttttgggctgagacgatggggttttctaaaggtgcaatcatgtcatctgcaaagagggacaatttgacttcctcttttcctaattgaataccctttatttctttctcctgcctgattgccctggccagaacttccaatactatgttgaataggagtggtgagagagggcatccctgtcttgtgccagttttcaaagggaatgcttccagtttttgcccattcagtatgatattggctgtgggtttgtcataaatagctcttctttttttgagatatgtttcatcaatacctagtttattgagagtttttagcatgaaggggtgttgaattttgttgaaggcttttctgcatctattgagataatcatgtggtttttgttgttggttctgtttatatgctggattacgtttattgatttgtgtatgttggaccagccttgcatcccagggatgaagccaacttgattgtggtggataagctttttgatgtgctgctggattcagtttgccagtgttttattgaagatttttgcatcgatgttcatcaaggatattggtctaaaattctcttttttgtgtgtgtctctgccaggatttggtatcaggatgatgctggcctcatgaaatgagttagggaggattccctctttttctattgattggaatagtttagaaggaatggtatcagctcttctttgcacctctggtagactcggctgtgaatccgtctgctcctggactttttttgcttggtaggctattaattattgcctcgatttcagagcctgttattggtctattcagggattcgacttcttcctggttgagtcttgggagggtgtgtgttaccaggaatttatccatttcttctagattttctagtttatttgcatagaggtttttatagtattttctgatggtagtttgtatttctgtgggattggtggtgatatccctttatcattttttattgcatctatttgatttttccctcttttcttctttattagtcttgctagtggtctatcaattttgttgatcttttcagaaaaccagctcctagattcactaattttttgaagagctttttgtgtttctatctccttcagttctgctctgatcttagttatttcttgccttctgctagcttttgaatgtgtttgctcttgcttctctagttcttctaattgtgatgttagggtgtcgattttagatctttcctgctttctcttgtgggcatttagtgctataaatttccctctacacactgctttaaatgtgtcccagagattctggtatgtagtgtctttgttctcattggtttcaaagaacatctttctttctgccttcatttacttatttacccagtagtcattcaggagcaggttgttcagtttccatgtagttgtgtggttttgagtgagtttcttaatcctgggttctaatttgattgcactgtggtctgagagacagtttgttataatttctgttcttttacatttgctgaggagagctttacttccaactatgtggtcaattttggaataagtgcgatgtggtgctgagaagaatgtatattctgttgatttggggtggagagttctgtaaatgtctattaggtccacttggtgcagagctgagttcaagttctgaatatccttgttaactttctgtgtcatcgatctgtctaatgttgacaatggggtgttaaagtcccccattattattatgtgggagtataagtctccttgcaggtctctaaggacttgctttatgaatctgggtgctcctgtattgggtgcatgtatatttaggatagtagctcttcttgttgaattgatccctttaccattatgtaatggccttctttgtctcttttgatctttgttggtttcaagtctgttttctcagagagtaggattacaactcctgcttttctttgttttccatttgcttggtagatcttcctccatccctttattttgagcctatgtgtgtctctgcatgagaagtgggtctcctgaatacagcacactgatgggtcttgactctttatccaatttgccagcctgtgtcttttaattggagcatttagcccatttacatttaaggttaatattgttatgtgtgaatttggtcctgtcattatgatgctagctggttattttgcttattagttgatgcagtttcttcctagccttgatggtctttacaatttggcatgtttttgcagtggctggtaccagttgttccttcccatgtttagtgcttccttcaggagctcttgtaaggcaggcctggtggtgacaaaatctctcagcacttgcttgtctgtaaaggattttatttctccttcacttatgaagcttagtttggctggatatgaaattctgggttgaaaattcttttctttaagaatgttgaatattggcccccactctcttctggcttgcagagtttctgccaagagatccactgttagtctgatgggcttccctttgtgggtaacccaacctttctctctggctgcccgtaacattttttccttcatttcaactttggtgaatctgacaattatgtgtcttggagttgctcttctcgaggagtatctttgtggcgttctctgtatttcctgaatttgaatgttggcctgccttgctaggttggggaagtactcctggataatatcctgcagagtgttttccaacttggttccattctccttgttactttcaggtacaccaatcagacatagatttggtcttttcacatagtcccgtatttcttggaggctttgtttctttttactctttttttctctaaacttctcttctcacttcatttcattcatttgatcttcagtcactgataccctttcttccacttgatcaaatcagctactgaagcttgtgcatgcgtcatatagttctcgtgccatggttttcagcttcatcaggtcatttaaggtcttctctatacactgtttattctagttagccattcatctaatctttttcaaggtttttagcttctttgcgatgggtttgaacaccctcctttagctcagagaagtttgttattgccaatcatctgaagcctacttctgtcaactcgtcaacatcattctctgtccatctttgttccattgctggcgaggagctgcattcctttggaggagaagaggcactctgatttttagaattttcagcttttctgctctggtttctccccatctttgtggttttatctacctttggtctttgatgatggtgatgtacagatgcggttttggtgtgaatgtctttctgtttgttagtttttccttctaacagtcaggaccctcagctgcaggtctgttggagtttgctggaggtccactccagaacctgtttgcctgagtatcaccagcagaggctgcagaacagcaaatattgcagaacagcaaatgttgctgcctgagccttcctctggaaacttcgtctcagaggggcacctgcgtgtatgaggtgtcagtcggcccctactgggaagtgtctcctagttaggctactcgggggtcagggacccacttgaggaggcagtctgtctgttctccgatctcaaattccgcggtgggagaaccactactttcttcaaagctgtcagacaggtacatttaagtctgcagaagtttctgctgcctttttttccactatgccctgcccccagtggtggagtatccagagacaggcaggcgtccttgagctcagtgggctccacccagttcgagcttcctggcctctttgtttacctagtcaagcctcagcaatggtggacgccccttccccacccttgctgccaccttgcagttcgatctcagactgctgtgctagcagtgagcgaggctccgtgggcataggaccctccgagtcaggggcaggatataatctcctagtgtgccatttgctaagaccattggaaaagtgcagtattagagttggagtgtcccgattttccaggtactgtctgtcacggcttcccttggctagtaaagggaatttcccgaccccttacacttcccgggtgaggcgatgcacccccctacttccactgacactccgtgggctgcacccactgtccaacaagccccagtgagatgaacccggtacctcagttggaaatgcagaaatcacccgtcttctgcattgctcacgctgggagctgtggactggagctgttcctatttggccgtcttggaacccctatccttgctcttattaatacctcaagtgacatacagttcagtgtgccctacatgtggacggagggtgagagtgaaggctgccatttagaggcagccctgcctggttactcatccttcattctgtaaggagctaagtgctactgtgttctcagaacgtttgtgctaagcagggaacccctcttttgaactgtacgggatataaaagtgaacacaatctactgctctccccatactgacccactagccttacttgggctctgttcgcctgggcacatgcacttacacagctttaaaaaaaaaaggaaaatattataataggatcttttaggcaatcaaagacattcaaaaacacattcagatgtttgtcaggccttctgcttaggcacacccatgaaagcatcccaagccatttatattttgacttgcaaataaactggcaattgctataattgagagcattggcaaagcatcaaacttcccttccaaattctattgttcttatggtaatattaatttctgtctcccaaactgagtgtagaggcatggatatgtgacaataggatgttttctaggccaaggatgaaaaaccatcatgggtaaactactaagaagagtgtttacacagataaaaagaaattgactaacattttgagttttgacttcccaatctctttttttaaacattaatgatttcagagaggaatgtttggaagacacatcattgattatatgctgtacaaagtgatgctctttttattgtaaagcagtgagtcaatgaagatttactgggatctgccaagccaatattctagtggccaaatgtgcagacatttgcagaagcccactctacttccattggcccaggaagcctagcaaccaacggggagttagctgtaccctttgctgatatgcactagtggtatggaggacttattaagaaaaagagagagccttttataattgacaatagcgcttaccttttaaaatgttaaacatactataccatatttttctaagttcagtagtcttactttgggacacagaaatgcatcactatttaaaactcacctatccagcaaccttaactatctggaacatatatgagatccaggaagcaaggtaaataggtttttgagcaaaatagatataacaaaatctatttacctacaggtttggtaggaaattccttcagtcatcactcagaacctagttattcttatttgaaaccaccttaattttctaaaatttagttattgggttttttaattcacatcagatcagaagcaacaatagagtggaaggggctagaagaaactatcttgagtgatctagaagggagtcagctaacaaaagtgagaactattagctgttaaattgaatgtaaagaaaaagacattaaaaaagaaaaaagccgggcgtggcagctcacgcctgtaatcccagcactttgggaggccgaggcaggtggatcacctgaggtcaggagttcgagaccagcctgaccaatatggtgaaaccccatctctactaaaaacacaaaaattagctgagcatggtagtgtgtgcctgtagtcccagctactcgggaggctaagacaggagaatttcttgaacccgggcattggaggttgcagtgagccaagattgggccactgcactccagcctgggcaacagagcaagactccgtcaaagaaagaaaagaaaagagaggagaggagaggagaggagaggagaggagaggagaggagaggagtggagaggagacgggacgggacgggacgggatgggacaggaaaggaaagaaaagcaaagaaaagaaaaggaaaaagaaagagaaaaagacactaaaaaggaaaggagagaggagagatgggcaaaaggatggagcgagggaaggaggctataaaaagaagactcagaatcttaaaatgctcaagtcctaggcatttgattttggcaacaagccttgatctctaggagcagctgagcacatcctatatccaccatatcacaccataatttttatgttcataaatgaccccagtactccataaaaagtttcaattaggaaatcagagaagcgcctcatttttagaagtgtgcacccaatagattaaaagtttggccgggcgtggtggctcacgtctgtaatcacggcactttgggaggccgaggcgggtagatcacgaggtcaagagatggagaccaccccggccaacagggtgaaaccctgtctctactaaaaaaacaaaaaaattagctgggcatggtggcacgcacctgtaatcccagctactccagagattgaggcaggagaatcatttgaacctgggaggcaaaggttacagaaagccgagattgcgccactgtactccagcctgggtgacagagcaagagtccatctcaaaaatatatatatatataatatataaaacatatatatgttatttataagttatatatatgttttataaggtatatttatgttttatatgtatatatgttatatatatgttttatatatgttttatatttatatatgtatgtttttatatatatatgtgttttcattcctgaaagggtgtgctttagatatttagacatgatgatgccagaaaaatatgttttaattgtgtgcatttatgaaggaaaaggaagaatgggctgagaattattattgccttgctagttgaagatttcacaatggaggttgtcccagttcttgaagtctccacatttccttgatttctgatattgcgatttttattcacttcagctactaacccaaccaccttgcagccacatctcagtgggcttcatcatccatctgcccttgagttcaaattaatgcacacaaagaggttactggaggaatcaagaaggtctcagaacctatcccttaggaatatggagagcctgttgattaatggaaaagagttgcacaactcaaggccaagtgctgtttccgtggatctgtacatgagaatactgcattctatatgactttataaaaatagtcacccaacaggtgttgttgaacacctgtagacatgtttacaggtgacagtgtagggggctgaatatgtagatgaagccaaactgagattgttctggaactttgatgatggtattccagacgggacaatggcagtgggtcaggcgttggaggcttccgtcttaatcactgctcttctacttggttaaatgtagtagttaccatctgcagtaggctgtactggttgtctctggattgtccctagatttgcccaactaaataaagctagccattataacacccagcctcttagctcagagcacaacagccaaaggtttatttctcacccatgtgacagtttgctggtggtcagcatgaactcaagagcctttcatctgttggctgtactgagcttttaggacctcacagtcctcaatttcatcttcttcaggccagtaatggaggagagagaaatagaggggggaatatgtaaaaagctttaaagaccaggactaggctagaagtacagtcatgcatcgcttgacaatggggatactttttgagaaatgcatccttaggttatcttgttgttgcttgaacatcataaagtgtacttacacaaacctagatgggataatctgctgcacacctaggctatatgggatagcctattgctcctaggttacaatcgtatacaacattttactttaccgaatactacatgcaattgtaacacaatggtaagtatttgtgtatctaaacataggaaaggtatagtaaaaacacagtataaaagattttttaaaatggtacacctgtaaagggtacttaccatgaataaagcttgcaggactgggagttgctttgggtgagtcagtgaatgagtggcgactgaatgtgaagccctgggtcattactgtacactactgtggactttatatacactgtacacttaagctacaccaaattttttttaaatttttttcttcagtaataaattaaccttagcttgctgtaacttaactttataaactttcttaaactcattttgactttttttttttttttttttgagacagagtctcgccctgtcgcccaggctgcagtgcaatggctcgctgcaaatctcggctcactgcaaactccgcctcccaggttcaaatgattctcctgccccagcctcccaagtagctgggattacagatgccagccaccaggcccagctaattttttttgtagttttagtagagacggggtttcaccatgttggccaggctagtctcaaactcctgacctcatgatctgcccgcttcagcctcccaaagtgccgggattacaggcgtgaaccaccgtgcctggccttgactattttgtaataatacttggcttaaaacacaaacacattgttcagctgtacagaaacattttccttctttatatgcttatactataaacttttttctatttttaaaagtttttttgttttactttttaaactttttcattaaaaactaagacacaaacattcacattagcctagaactacatagtgtctggatcgtccctattgctgtctttcacctccacatcttgtcccacttgaagttcctcaaggatgatagcatgcacggagctgtcagctcatgacaacaatgccttctggaatacctcctgaaggatctgcctgaggctattttacagttaactttttttaataagtagaaggagtacactgtaaaataacaataaaaagtatagtatagtaaatacacaaaccagtaacatagttattatcaagtatatatactgcacataattgtatgcgctctacttttatacgactagcagtgcagtagatttgtttacaccagtgtcaccacaaacacggcgtaaagcattacgttacgatgttagaatggccctgacatcactaggcaataggaacttttcagccccattgtcatcttataggaccaccaccatatatgcagtctacagtgggcaaagtttgtcattcagtgcgttactgtgtgttatttctacccactttcagaggccaccacttcatcacctgacctcatctaacgacaggggaagcaatgaagtaactttaactgtgtggccagaaaggaaaagaaaaccaaattctgatggacatctgatgtttttactattcctatgaatgtattccaaggttctgagagggtagggaaagcaggaataagagtgggaaaatacatttagcaacattcttgagagttttttcttagacttgtcagtgttctcagttgtgcccatcctcaagctccaaagattctcccacaaggcatttggccaaggcacttcatttttccaggcctcagtttccccatgtgttaaagtgaggggttgaattagaatacctttcaagtctttgggccccttaaagatccaaaatcccatgattctgtaatgattctgtatgattcccctgatgttcccttccccctgagacaaataagcagtgccagtatgccaataatttatgttttattttaattttccttctcaccttcaaagcttgagtttctagatattaatatataacaatagacaaagttgttatgaatacagtagtgacttttatggcaaagtaaagttattttgtgtttggatgaacagcacattcacacacgtatataatatacacagagctccatctgtgaaaaaataatcttgtttgaagtcttgcaaaacttatgtcctcctcctactcttgccctgtattagttttgcaattagtaacaaacaaacaaccgtgacatctctgtggcttagaacaacatttactctccgctcactttacatggggactgtgagtcagcagcagattggctgtggctctgctagaattggctgggttcagctgggctctcagtggggctccacctgtcttctcattttaaaacccaaacgaagggtatagacactatctgtgacatcctaagggcagtggagaacaaaagcaaggagacctaagacaaaccatccagttgcatttaagcttcaggttaaacacggcaaaaaacatcacgaccattcacatcccatgggccatagcttttcacatggccaagtccaaagtgattgaggtgggatatgtactcctctcacagaatgcacgagtacctcccatgacagtgggtaggaatatgcaatcctatggctgggaggaagcaaatagttggggacaataacccaacagatcacacccccaatgcctctatctaagttctaaatacaacatttcccgtagagaggaagccactctgcctcctccactgcatcttcctttcctgcccctctcagcttgagctcaggctccaaaacttgagcgtgataagaatcatctaagtgcttgttaaaaatccccttcctagggcccccctttccaaagatcttgacacatatgatctgaagtaggcagtggtgcccaggcatgatgccccaggaatacctactgctattgaagagctctccccggttcccacagccttcagcatcagacctgcctttggattgggggagcatgctgagtgagccattattaggaagagggctgccttagaggactcagaatctacgaccccaaggtcctctgacctgtccccactcctcacagccagcatggattttgtacttctggagctccttgaaggagggtcattgcacgtttgaaagtgtgatagttagcacagaccccagagatcaaatcctgagttcctcttcctccatatccaactcactagctgtgtgaccttggacaactcactagctgtgtgaccttggacaactcgcagaccgtctctgggcctcagtgtcctcatctgttagaaaggaataataataatacctacacctcaggcttcttgtgagggtgaagcgagttaacaaaacagtgcctggcatgcagtggatcacatataaacatttcatgtgtgatattatacatgtttttatgtatttataagtgtattctatacaagggtttgctgattttattggcacacaggtctgagaacatgggaggcttgtgagataaagttgcctcctattggaggtgttatatggggagcatgctgagtcagctgttatcaggaggaaggctgccttagaggactcagagaatttacgtgtcaggtgatagcatgtaagtcagtggttttcaaccccagctttaatttagaatcatctagaaaggttttttttaaaatgcccatgtccttccaagtgggctcaattctgagccaattagtgagaatgtccagggacaaaacaaagaaatgaaaaattttaaggccgggcacagtggctcacgcctgtaatcccagcactttgggaggttgaggtgggcagatcacttgagaccaggagttcaagaccagcctggccaacatggtaaagcccgtctctactgaaaatacaaaaattagccaggcgtgatggtgcagatctgtaatctcagctactctggtgactaaggcaggggaatcacttgaacctgggaggcagaggctgcagtgagctgaaatcgtgtcactgcactcctgcctgggtgtcagaacaagattctgtctcaaaaaaaaaaaaagaaagtaaagaaaagaaattttaagacactccttggactgtaatgggaatcctggattagaaaccactgatgtctatagaacagctctgtaaactgcaaaacataatgtatgatttatgggtgttttttgattgttagtaactgattgatgatctcatgagggactagttcctctgaaaatcaggccaacgtgggttttccaccatctgtcctacatgtgcactggctgggggaaattgaaactcatccaattcctattcttgcctttaagccaaaaagactgctcgaaaacaagcctccttgggataaaagatgttgctaggatgaggaagctgtagtgagtgagtggagttaatgtgattagatttggaagcaatacttccagccatggggaagcatcggtgttctgtgttattaaagtgactccagtgcaaaggcacatatatcgtattggagtaatttgccctgactaggttagaagccaggagatggttcttcacaggtattcctgagtggcccaaggtctaagtcagctctcgtttagacaaatcctatctctgctgatcatctacctctcaccaaatgcagccatcaccatgcacagcacatgcgctcctcttgatgatcttcacagagtgcagagtcttcaggaagttctttcctcagtggaacctttgggatttctaggagaggggcaggggaatatctggaatcagaggtgaacactttacagcagcctctaaactacttctaattacgttcacctgactaaactgccaggtgataaacgttttatataaaagtaattcactatggaaagttctggatgttttccccaatgggtacctcaaaacagggtacaagatggaaacctgctcaagaaacagcaaaatgtaaactggataatggtgatgataaaaaaataataatgaatgaccacacgagcaagtgtcctcttgtgaactttcacagacaaatgcatagatatgctgcctggactatgggcagataaacattcattgtgggcacatgtttgtgtgaagctaattattggcagagcaagaacagctggaactttcatctccccacctgcaggccagggttctcttggcactatatcctcagttttcaatgtcttcctgaaagagcggctgccatgttctccttaaaacttctttagattcccctgtcaaatactgaaaactatgctggctgtaagtctagtgtttgaaataccagcgtgggaccagtcttcctatatgcagagttttgtcccatgtcttagaatctttttctgttttcttcaccttttgggcttcatttattcacaatcattgactgttgacattgggcagagcttgtataacagtcttaatctttagcctggtatgtaatatctaatccctgctgttcctcttcccgccctgagcacattatgtcctttactttccagattaagtgttggcattctgtactggaaagaaaactccaacttcttgccatgtgcagtggctcatgcctgtaatcacagacctttgggaggccaaggcgggtaaatttcctgagctcaggagtttgagaccagcctgggcaacatggcaaaaccccatcactgcagaatatacaaaaattagctgggtgttggtggctcgtgcctctagtccccactactcaggaggctgaggtgggagaatcacctgacccagggaggtccaggctgcagtgagcggtgatcatgccactgcactccagcctgggcaacagaacaagaccccgtctcaaaaaaaaaaaaaaaaaaaaagcccaactcctggaaatcaaatggtacctgatgtgaggttttctccctgttatgttagcctcaggccatctaacccaggtagaacaaggcaggtaaggaaacccagtgggccaaggaccccgaaggaagcccttaacacaatgcctaatactgaaaacaacggatgaatgtattcaaaatttgtttgcaagaaatgagactttttgcctttttaggacaaaaaaagcacttgaaatttaatttaggttaacaggagatatggcgggtagcacagagtgattatgaaatgcacagggcttccctgccattcgagttttgatcaatctcagcaaaacccaaagtttgccaaaacctggaaacaactcaaatgtccatcaacacagtagaatgaataaatgagttatggtatttcattcaatataacatgaatgaaaatgaatgagatgaaatgaaaatgaattatgtaaaactacatgtaacaacaaggatgaatcctacacccatgtgaaatgaaagaagccacacacacacacactcaagaaatgcatgttgtatgatcctatttatataaagttcaaaggtaggtaaaattaatctgtactgttagaagtgggaagaatggtttctatcaggaaggagtaggtagagattgggaggagttgcaagttggatttctggggtgctactggtggttaatctcttgacctgagtggtaacatagatatattctttttgtgatacttcattgagcagaatacagtcataagtgtcgcttcatgatagggctaagttctgagaaatgtgtcaagagatttcattgttgtaccaacatcatagagtatacttatacaaacctagattgtatagcctactacacacctaggctagatgacatagcctattgctcccaggctacaaacctatacagctgtcacagaactgaatactgtaggcaattgttacagaatggtaagtgtttgtgtatctaaatatatctaaacatagaaaaagaacagtaaacatacagcattataatcttatgggaccaccatcatatatatggtccatcattaactgaaatgtcattatgtggcacatgactgtacttacaatttgtgcatgtcatatgtatgatagtctaaagttcaaatgttggattgggccttgcttgattatccaggaactgagtttgcaagagctaaaaagaacctcagaatccctgcctaacagggatggcagggtccatttctggaccctaatggtaggtccatttctggagttaggaaaactgagtcaaaaacctgagtagaaggttgcagcaacagatacagcaggacaggttggggactgtactcagggggatcaccagataccagtcttgggagcaagttccacagaatggtagggctgagattgctggcaggcaggattggcttggggactgcataggccagaacataaaggtgaagtctaagagagggtattgcagaggatgaggggttgacagtggggagtggtatgttgggagctcagatctggtttatttttaactctcatgaggccacactgcctcctctcctatgttattcccttcctaatgtggatagtatggtcagcccaggccatgggagtgtggccccgattttccatgtagggagactggctctagtttctcaaaagcacaagctgctggacctttttctcaactgttggcctacgtggaagagacttggcttaatggaagggagaatgaagagaggcttttggaaagagagggcctaaacaggatcagcattgatgccaagcaacacaagggagaagggacttttcttggcgttcataccacggtgggccacagtgtggtgggaaggcatatttgcatatggtaaggggaggagcttaagggtaagagagtctttgaagattgggaagcaaggaaaccaaggcagctagccacaggcaaggtgtgggggctgcaaacttgctataaacctgctcttcagatccaccacttgcatttttaaccctcagtcaaaaccaaggagctgctgaggagtgatgcctaagatgatagtccccaggatgtgtggggctgactttttgctaactgaactgcaaatatttggagccatttgctgctataacatcttaaaaagatgaggcccctcattggatattccagtcccaattgggagagaataagaagggccacgcctgccctcgatcaagatcttgagtgcaatgcagggtggactcagagagacaaaaacctaatttatccccagcttagtgtctgccagccataaaaagaaaaaaaaaggtcggtggataaacaagagatgtgcctagtgctgagaagcatctccttgtgtgttcagagttaattaacatttagcatagcccctttaggggtgagaagttgtgattgtctttctctaaaggttaaattacctccattatgtttgccttcctgggaagaaaatgcaggatgagttggaaaatcactgttgaaacacaaccgtgacaccactgtgagtatgtctaattccctggcatgggggttttaggcattagaaagtgcataatagtaactagattccaggatgtgtctcaggaaatcccaaagggaagctttttttcattcatagaatacttcctgaagacattattataggaaaactttatttaggagagtttctttgatcctgtactagcacatgagaacatgtaagcagatgacaatatctaatatctactgctgcctgacccactctgcttcccatcccagagtttcttttgcaaaacgcatggagccctgcttcgacaaagctctctagatagcacccaacctcaccaggaaggtctgatttatagcatgttgatcttaagcatgttagtgcaacgcccaaaagagaaaggaagtctcaataaagggatattatagaaagtcttcagccagtggatagactctcatctctaagccaggctgagatcaccagatcagcaggataaagaactatttggggctatatgtacctaatgaggctggattcatgagatcaacagtatttaaggtccttgggcgtaagtagggcagtagctgagaaggcctctctcggctctggctctcctgcccctactcagaatgccacactcacccaaggcttgatgttgctcactgtgggtcagtggctgttgtctccaccgtctctcccacagagggggaataattgcacccccatcacagactttccacaagtcaggatgatctctcagtggctctcaggtttcccaagtatctttcccccatgggcatttgactgacaatctactaaatctctgtacttccatttgctcatctgttaaaacctgtagctgctcacggggctgttgtgatgacaaaatgaaatttacatgattaaggtacttaactttccccagtgcctgcccataatagatgctccagaagtgttaggcattattttaaacccagtaggagtctttaaccacttgattttaattagatgaccctcaggggtgagatgcagtgggtgatttagaaagtgcaccctgggagggcatttgcttggaaggaatcttgtaggagcaggtagaaggtccccaaaagaacaaaatacgggtcacctcacaggatccaccactggaccgggatcctttactgaagctggagcctcattatgaaagagctacttggccgggcacggtggctcacgcctgtaatcccaacactttgggaggccgaggcaggtggatcacgagttcaggagagcgagaccatcctggctaacacggtgaaaccccgtctctactaaaaatacaaaaaaaattagccgggcatcgtggggggctcctgtagtcccagctactcgggaggccgaggcaggagaatggcgtgaatccagtaagcggagcttgcagtgagcccagatcgcgccactgcactccagcctgggcgaaagagcgagactctgtctcaaaaaaaaaaaaaaaaaaaaaaaaaaaaaaaaaaaaagagctaattgatggtacctgggtgcccaaacctctactgttgctatcgtttctccatgtctgagtacgtcccacaaggagcagtagcaaaagctggtctttcaggggctcatcaaacacactcagacgtttcaaatgtcccaagatcggcagctttgatcctgaatgttcttcccttgattaaaacaacaacaacaacaacaacaacaaaatgaaacaataaaaatttaaagagaaatttaggccgtgcatttctaagaatttacacttagttcattaaatctattgttttctcagttgtttgaagtccaacaagactaatgagcctttttttccaaatgtctttaaaaatccttttttcttacaaggccatttagaggctttgaacgttgttccaagggtaataatattagtattaataataaattattccaaactcccaacccctgcaggttcagaatttacttaatactctgaacccaaggaatttaaattattaccagaatttattaccttttgtttatggggctttccaaacaggagaaagaaaccacgtggaggttcactagagtgcattgtgtggttcgctttgcggtaatgcatataacccagaagacttccagaaccttctcagcttgaaccttcaaagcctccctaatttggtggaatcagcatggttatgttgagattgtactgagggtactgacttttcagcctggacaatttttggctgatggaccagagcaagagccctcgtaggattctcccataggacatacaatctatgttacataagatggatgatatattgttaggtggctatggggtggaaagagaacaatttttctctggggtgtgtgcaaaggaactgactgccttgctgccccttgaactctctaccttgtcatctgaggacctctggtggtggaaattttcccagcgtgtgtgaattgatgtttctgtgccaagccatccaaccctgttacattttcctacattcctttcctcctattttgtcattcacattaagcaaggagcaacaatcagttgcaaatacccagaataaagtggtggatgtgcctgaccagactgccatttcacaaaagttacctgctaccttctcttccagtgaacttctgatacatttcctgcagcaagagaaggcagccaacatgaaggaaaatgtggcatctgcaaccgttttcactctgctactttttctcaacacctgccttctgaatggtaagtaagaggctatcacgctctctttcattgcctggggtgtttgtcaacagggtggagagtccatgcagtcttcttgcaatgccattatgaaaaatgaaaatgctgtgttatgtgctgctgttaaattatttgcaatattttgcattaaagttaatgcagaaaaattaatgcaattaatgcaaaatcttgtcactgtgctctctgccttttgtcctcatttcaggagtgtaatgaaacagctctgaagaagacaggacctgagttctaatccaggtcctgccagtttctagctgtgtgacctagagccaattacctaactctctgggtttccaaattctcaaagtgaggacagtgatgtttcctctactgcagatgaaataatgtatatgaaaactctttaaaaaaccataatgggatataagaggttgctgttacatggcgggaagcaggtacagccgactctattatctgtgctaacaggagaaatgaagtccacagctaaatgagagggtgggtgcctgtgactatacacttctgtatgtcaacccatgtgcatttctgggtgtgcagacttctatatgtacctgtgtatatattaacttttctatatggacctgatttcaaatgtctctctgtctgaacctgtatgtatatacttttatgtatgtctgtgtgtgttctgtgtatatccgtatgtgcacacttctctgcaggtacctgtgtgcatacaagtatgtacttccatgagtatgcacctgtgtatatttttgtgtgtgtgtgtggtgtgtgtacttttgatgcgggctctgtgtgggcatctacatacctgtatatgtggttcctgtgtggttttctccgtgtttctgtgcattgagaaagtccattaatgttaacttgttcctctaatgcagatgaaggaaacatttgtctaattgtaattttacaaatctaccctcctctcttgagcttcctgaaggtactattaataaacagtaaaataagaaagagaagctttcagagagagaaaaaggggaaagcagaggtcagaatgacccacaagagaaactaaatactcaagaaatcaatgatcaccctaattggcttccgagtgtgctcattatggaaccataggctttaaactttttaaataaacttttctttctacttcacacacttctccccactcatgacaaaagcaaagcaaaacaaaaacttgcattcttgctgtaactcccagcaacacattatcctgaataaattgttcctagaggatgagcaatgttacaaatattggcagagctgacccgggctggcaaggacgggttttagcagggcctgtgagcaggagggtaggtgagtttcagctgacactactagcctggtgtcctgggctccagcctgtgtcccacagcatgccattccactaaattcctctttctggccagctctgcctagagaatcctcttcccacgcatttctcctcactgaggtctcctcctaacctgctgtttctgctctggtgctcagctagaaactctggccttggagcctgcatgaggggtagaggagaaaacagagagaacccccggaggtgctgacccatatctgaaagcgctcctctctgctcctgatatcctaaactcaatgctagggcatccagctagacaaaaaagaggatcagctgaagtcatgtaggcgagcatggtggcttcccagccccacagtatcagggcaaattcccagggctctgctgtccctctttgaacctgacatccaagcaagagaaatgggagcccgcttgccaagagctttggggatttggcaactaaaaaattttacactcttggtgttatattttcacaccacctcactgagaccttctagcatccagtctggaactgggtacagctcttagataacagtggttgctcagaaccaggagaggagctggctactctcctacctcttaccacacctcctaccccaaaaagatccatcaaattatagttttatagaccctatgggattacaaaagggccacacactcttgaagccctacgtatccaaaggaagccctttgcaacctcaccacacacacacacacacacacacacacacacacacaaaggaaagagaggaaaatctaagagaaaaaaaaggactaaaaaccaagattcagaaatggggatggggtggatgaggagacagactgtgagtctgggtcacaagatcaaagctgaataaaatcaaggaaaagtggccaggtgcagtagctcatgcctttaatcccagcagtttgggaggccaaggtgggcagagcacgaggtcaggagttcaagaccagcctgaccaacatggtgaaaccccatttctactaaaaatacaaaaacttagccgggtgtggtggtgtgcacctgtaatcccagctgctcaggaggctgaggcagaattgcttgaacccaggaggtggaggttgcagtgagccaagatcgcaccactgcactccagcctgggcgatagagtgagactccatcccaaaaaaaatcaagaaaaagtgaagggaaaggggaaggaaaggagaagatggggaaagaggaaggaaaggatgcccagatacagggagctttagcgatgtagtgaacggacagaagatcaggaacaagttgagttcattgtgtggggatggcagaaagatggagattggtgagctgagtggagaagtgccatagagcggtgttttgccagagtgtctgcggattgctcatacctgggaaggattctttgtatggttcccttaggctgagggagggtatcagctttacagaccttgtgggattacaaaagggccaccacacactcttcaaccaatatgtgtctatcttgcattcaaggctcattctttgttgaaattttgcagttggtcactaggctattgttatctccatctcaaagtacacagacacacacacacacacacacacacacaccagcaaaatgctctctaagagcaatgccaacatcagggcagcccacagaggagtgttgctggatgctgatgcttggcattcctgagcatccaccctaggtctcctcagcctgagacttcatcgctggctttggtccatcaatctgtttctgtcaccagcagaagggtcaaatggttaaatggacctcaatattgatgcagtggcttctggctttttctaggacagttacctcctggaaaacctgagatctttaaatgtcgttctcccaataaggaaacattcacctgctggtggaggcctgggacagatggaggacttcctaccaattattcactgacttaccacagggaagggtaagaagttcccttctctcctatgaaaccccacatgagtactcccattctccaggccaaagaaacactggttctgagtgacagcacatccctgaatttacaccagtaaggttcataccaccggggaaaggggagtctaaggtccatgcccacattctcctgttaatgtctgttaagagctgtgtcaatatacataaggttaccagccatagcagtacaatatcagtgttactggatgctgatgcttggcatttctgagcatccaccctaggtctcctcaccctgagacttcatcacttgcttgggtcccatcaatctgtttctgtcaccagcagaagggtcaaatggttaaatggacccaatattgatgtaatgtttcaaatcccctctcacagcttaggttgcagcctgaggccccatagaagtgtttcttaattgctagttaatcttaaatgctcatctataattcttatgccatttgtattttttttaactaaacatgtcacttttgcaaaataagtaggatcgtgtgaagtggtaccatacaatccttgacaaatgtggtatattaggttttcaaacttgtttcatgttcaagaaaataaagaaccttgtagggaaaagaaggtgaggttttttccttagcacattgctcatccaagagccaccatctcctagaagacatattgggacctaaggttgaaatgagggctaaaccagatcatctctgtgcaagcattttgttacgctgacagtgagaccctcctgaaaatcatgggagagctgcattcttcttcagaaaggaaaatatttagttgctggtagagacagctggcccactttccaatgactgcactttgttgtacacaaaactgtcatcccggctgaaatccaaagggacatcatgtaaacagatttcaggaactcagatgcaaccagaattgaacaagcctccacccctgtgcagtgtatcttgagctgaggttcctgagtctaaatgtgagcagcctactgagccacgtgggcttgaaatacctcctctcaacgtcacttcactttattgctgacttggtgcagtctgaaatggaccaacatcagtttttgtcctcttgaacccttttttaaaaaacgaaaagtaattcaacacgtatgtgaaatagctgctgcattgtgcatgacccctctgtgtgtggacaggtgaaagttccaatttcctgaggcaacccaatgggcatgacctgggtatggtggtgcctgggccattgaaagctcgagtgtttatcagcagggaatataggtccccgagcccacaagaacacttatagaaaggaagggttgatggaagaagaatacttgaggccctaaaataacctttccaacatgctcttccctctctcactcccagctgaaatgggcagaacatggaagcctaaggaaccatttgtcagctctgggttttgcgcttggaatttctgatacccaaaggccagtggtattgatctatgaagaaaaaaactagactctctttattactttcttattcattcctaatacattacttattgcagagagacactcatgcatgaatgtccagactacataaccggtggccccaactcctgccactttggcaagcagtacacctccatgtggaggacatacatcatgatggtcaatgccactaaccagatgggaagcagtttctcggatgaactttatgtggacgtgacttacataggtaaggggaaggaaagtgggtgaggaatttcttactccactatgtattagccaatagtcacactcagtttgagtcttcttgggttttggatggatccccaaaaagaaagatgagaaaactcacgatatgcttgtcaacagaacagttcaaatcattttttatcaagtcattcatgacactaaggctggcacttgggatccttgtgttcctgtgctttcccttgaccctcatcctcttgcactcagcacaaatgttctatgtatgtttcccttgccaactcttctttcttgccctgcccttgcaattgatgtccgcttcttccttggcaagctgggatttcttttatttctcctcatggaagacagagctgctccatgaagaagaagttcttagaagggttcatctgattctgcacccacagcaattgctcccattgctttgccccaaactcatatatgtgtgtgtgtacatatatatgttgcatatatgcgatatatatattagtgtgtgtgtatatatatatatacatcattggtaattttttttactaaacatttacaaagtaatcatgttacttttataacataagataatatgaggtggtgccatgtaattcttgacaaacatggtgttcaagaaaataaagaatgtaggctgggcgcggtgcctcacgcctgtaatgccagtactttgggaggctaagacaggcagatcataagatcaagagttcaagaccagcctgaccaacatggtgaaaccccatctctactaaaaatacaaaaattagccggctgtggtggtgcgtgcctgtaatcccagctactcaggaggctgaggcaagagaattgcttgaacccaggaggtggaggttgcagtgagccaagatcatgccactgcactccagcctgggccacagagcgagactccacatcaaaaaaaaaaaaagaaaagaaaagaaagaatttaaatgttaaaaactaccaatggtctgtgcacacacacacacacacacacacacacagagagagaggaagagagagagagagagatttatcacctctgcatctactggtgctgccaaggttgcaggaaggtcatctccaagctgaacgggaagctctctggcatggccttccatgtccccaccacagatgtgtcggtcatggacctgacctgctttttagaaaaacttgccaaatatgatgacatcaagagggtggtgaagcagggacaatgttctggagagccccatggttgttgtacctcagttgcgctgaggggccattcacagtcttctttatggagtgctggcatggactgtggacatgagtccttccatgatgaatgacaaattttatataagtgtggtgtgtgtgtgtgtgtgtgtgtgtgtgtgtgtgtattgccttaccctcaagcattataatatttgaaggcaaaacaatgaaagcaagaaatgttctgaaattagcaactgttttaataaatgcgacccacaaaaaaagggactcactaaagaaaagtaatatgtttaaaaagagaaatcaacaagtgtatatgaaattctcattgatcctggaaaacaaattctctggtgaaagaatatgttggaccatatttttcaaaataataaaagaagtgtccacagaactctcctataaccctgcagcctacagtgttgggacaggccacggaagttcattttaaaatgcacggtacattttctgacacttcgactctcatccagcaataacctgcagtacagaatgacaacattgaaagataattgctcaggagtagagttctttgttgttgagtaatatttagttacattgaaaacacttaaaagcagtggttctcaactgggagctgttttttcttcccacaggatatttggcaatgactggagacatttttgattgtcacaagctaggaaagtggggagatgggggtattacttgtatgtggtgcataaagcccagagatcctgctaagcattctacaaagcataggacatccccctccaacaaagaaatatccagtccaaaatgcaagtagtgctgaggttgggaaagtatgctctaaaagatacatcctcaacattttatttgcgtttttgtataattttttatcagaagcattgtttagtatgtatttaacttaaaacatatattaattagctgctgtttgtttaggaaatgtgctcaaaataatctttcttaggtatttactcagtaacatattagcttagacttgatggcaattttctttttttagtacaggggactttattgatggcacatggcaaagtgggtctccctaagcacctgctcttcagggagtctgcataaaaattgtgaggggagattctcactgaggtggagcactgagtgccacagggactcgccagcagctgagggtctcactcttgctcttgtgtgctcactgggggtggtggtccaggggtcttactacatggaggccatgtggaccatgagtccaccaccctgttgctgcagcctaattcactgtcataccaggaaatgggcttgacaaagtggttgttgagggcgatgccagccccaaaagtagaagagggggtgtcactgttaaagtcagaggagacagcctggtgcttagtgtagcccaggaggggtgtgtgtgtgtgtgtgtgtgtgtgtgtgtgtgtgtttgtgtattgccttaccctcaagcattataatatttgaaggtaaaacaatgaaagcaagaaatgttctgaaattagtaactgttttaataaatgtgatccacaaaaaaggggatcactatagaaaagtagtatgtttaaaaagagaaatcaagtgtatatgagattctcattgattctggaaaacaaattctctggtgaaagactatgttggaccatatttttcaaaatcataaaagaagtgcccacggaactctcgtataaccctgcagcctatgaaggggccctccgatgcctgcttcaccacctttttgatgtcatatttggcaggtttatccagatggcaggtcaggtcaccactgacacgatggtggggacatggaaggccatgccattgagcttcccattcagctcagagatgaccttgccctcagccttggcagcaccaacagatgcacagatcatgttctggaaagccccacggctgttgcaccacagtttcccagaggggccattaacagtcttggtggagtgatggcatagactgtgaacatgagtccttttgcaattgatggcaaattttttttattattatactttaagttctagggtacatgtgcacaacgtgcaggtttgttacatatgtatacatgtgccatgttggtgtgctgcaaccattaactcatcatttacattaggtatatctcctaatgctatccctcccccctccccccaccccatgacaggcccctgtgtgtgatgttacccaccctgtgttcaagtgttctcattgttcaattcccacctgtgagtgagaacatgcggtgtttggttttctgtctttgcgatagttttgctgagaatgatggattccagcttcatccatgtccctacgaagacatgaactcatccatttttatggctgcatagtattccatggtgtataagtgccacattttcttaatccagtccatcattgatggacatttgggttggttccaagtcttgctattgtgaatagtgccgcaataaacatatgtgtgcatgtgtctttatggcagcattatttataatcccttgggtatatacgcagtaatgggatggctgggtcaaacggtatttctagttctagatccttgaggaatcgccacactgacttccacaatggttgaactagtttacagtcccaccaacagtgtaaaagtgttcctatttctccacatcctctccggcacctgttgtttcctgactttttaatgatcaccattctaactggtgtgagatgatatctcattgtggttttgattttgcatttctctgatggccagtgacgatgagcattttttcacgtgtctgttggctgcataaatgtcttcttttgagaagtgtctgttcatatccttcaccaactttttgatggggttgtttgatttttttcttgtaaacgtgtttaagttctttgtagattctgaatattagccctttgtcagatgggtagattgtaaaaattttctcccattctgtaggttgcctgttcactctgatggtagtttattttactgtgcagaagctctttagtttaattagatcccatttgtcaattttggcttttgttgccattgcttttggtgttttagtcatgaagtccttgcccatgcctatgtcctgaatggtattgcctaggttttcttctagatttttttatggttttaggtctaacatttaagtcttaaatccatcttgaattaatttttgtataaggtgtaaggaaggtatccagtttcagctttctacatatggctagccagttttcccagcaccatttattaaatagggaatcctttccccatttcttgtttttgtcaggtttgtcaaagatcagatggttatagatgtgtggtattatttctgagggctctgttctgttccattggtctgtatctctgttttggtaccagtaccatgctgttttggttactgtagccttgtagtatagtttgaagtcaggtagtgtgacgcctccagctttgttcttttggcttaagattgttttggcaatacgggctcttttttggtcccacatgaactttagttttttccaattctgtgaagaaagtcattggtagcttgaatctgtaaattaccttgggcagtatggccattttcatgatactgattcttcctatccatgagcatggaatgttcttccatttctgtgtatcctcttttatttcattgagcaatggtttgtagttctccttgaagaggtccttcacatcccttgtaagttgggttcctaggtattttattctctttgaagcaattgtgaatgggagttcactcatgatttggctctctgtttgtctgttattggtgtataggaatgcttgtgacttttgcacattgattttgtatccagagacttgctgaagttgcttatcagcttaaggagattttgggctgagatgatggggttttctaaacgtacaatcatgtcatctgcaaacagggacaatttgacttcctcttttcctaattgaataccctttatttctttctcctgcctgattgccctggccagaacttccaacactatgttgaataggagcggtgagagatggcatccctgtcttgtgacagttttcaaagggaatgcttcctgtttttgcccattcagtatgatattggctgtgggtttgtcataaatagctcttattattttgagatacatcccatcaatacctagtttattgagagtttttagcatgaaggctgttgaattttgtcaaaggccttttctgcatctattgagataatcatgtggtttttgtctttggttctgtttctatgatggattacatttattgatttgcatatgttgaaccagccttgcatcccagggatgaagcctacttgatcatggtggataagctttttgatttgctgctggattcggtttgccagtattttactgaggattcttgcatcaatgttcatcagggatattggtctaaagttctcttttttggttgtgtctctgccaggctttggtatcaggatgatgctggcctcacgaaatgagttagggaggattccctctttttctattgattggaatagtttcagaaggaatggtaccagctcctctttgtacgtctggtagaattcggctgtgaatccgtctggtcctggactttttttttttggttggtaggctattaattattgcctcaatttcagagcctgttattggtctattcagagattcaacttcttcctggtttagtcttgggagggtgtacgcgtccaggaatttatccatttcttctagattttctagtttatttgcatagaggtgtttatagtattctctgatggtagtttctatttctgtgggattggtggtgatatcccctttatcattttttattgcatgtatttcatttttctttcttttcttctttattagtcttgctagtggtctattaattttgttgatcttttcaaaaaaccgctcctggattcactgatttttttgaaggttttttgtgtctctatcaccttcagttcttctctgatcttagttatttcttgccttctgctagcttttgaatgtgtttgctcttgcttctctagttcttctaattgtgatgttagggtgtcgattttagatcttccctgctttctcttgtgggcatttagtgctataaatttccctctacacactgctttaaatgtgtcccagagattctggtatgttgtgtctttgttctcattggtttcaaagaacatctttctttctgccttcatttcattatgtacccagtagtgattcaggagcaggttgttcagtttccatgtagttgagcagttttgagtgagtttcttaatcctgagttgtagtttgattgcactgtggtctgagagatagtttgttataatttctgtccttttacatttgctgaggagtgctttccttccaactatgtggtctgctttggaatacatgtgatgtggtgctgggaagaatgtatattctgttgatttagggtggagagttctgtagatgtctattaggtccgcttggtgcagagctgagttcaagtcctggatatccttgttaactttctgtgtcgtcgatctgtctaatgttgacagtggggtgttaaagtctcccattattattgtgtgggagtctaagtctctttgtaggtctctaaggacttgctttatgaatctgggtgctcctgtattgggtgcaaacatatttaggatagttagcacttcctgttgaattgatccctttaccattatgtaatggccttctttgtctcttttgatctttgttggtttcaagtctgtttcctcagagagtaggattgcaacccctgcttttttgttttgttttgttttccatttgcttggtagatcttcctccattcctttattttgagcctatgtgtgtctctgcatgggaaatgggtctcctgaatacagcacactgatgggtcttaactctttatccaatttgccagtctgtgtcttttaattggagcatttagcccatttacatttaagattaatgttgttttgtgtgaatttgatcctgtcattatgatattagctggttattttgctcattagttgatgcagtttcttcctagcattgatggtctttgcaatttggcatgtttttgcagtggctggtaccggttgttcctttccatgtttagtgcttccttcaggagctcttgtaaggcaggcctggtagtgacaaaatctctcagcatttgcttgtctgtaaagtattttatttctccttcacttatgaagcttagtttggctggatatgaaattctgggttgaaaattcttttctttgagaatgttgaatattggcccccactctcttctgggttttagagtttctgccaagagatccactgttagtctgatgggcttccctttgtgggtagcctgacctttctctctggctgcccttaatgttttttcctttattttaactttggtgaatctgacaattacgtgtcttggagttgctcttctcgaggagtacctttgtggcattctctgtatttcctgaatttgaatgttggcttgcctttctaggttggagaagtactcctggataatatcctgcagagtgttttccaacttggttccattctccctgtcactttcaggtacaccaatcagatgtcgatttggtcttttcacatagtcccgtatatcttggaggccttgttcatttctttttactcttttttctctaaacttctcttctcacttcatttcattcattttatcttcaatcactgataccctttcttccacttgaacaaatcggctactgatgcttgtgcatgcatcacatagttctcgtgccatggttttcagctttatcaggtcatttaaggtcttctctatgctgtttattctagttagccatttgtctaatcttttttgaggtttttagcttctttgtgatgggttcaaacatcctcctttagctcagagaagtttgttattaccaatcgtctgaagccttcttctctcagctcgtcaaagtcattctccgtccagctttgtttcgttgctggcgaggaactgcattcctttggaggagaagaggtgctctgatttttaaaatgttcagcttttctgctctggtttctccccatctttgtggttttatctacctttggtctttgatgatggtgacgtacagatggggttttagtgtggatgtcctttctgttagttagttttccttctaacagtcaggaccctcagctgcaggtctgttggagtttgttggaggtccactccagaccctgtttgcctgggtatcaccagcagaggctgcagaacagcaaatattgcagaacagcaaatgttgctgcctgatccttcctctggaagcttcatctcagaggggcacctgggtgtatgaggtgtcagtcggcccctactgggaagtgtctcctagttaggctactcgggggtcagggacccacttgaggaggcagtctgtccgttctcagatctcaaactctgtgctgggagaaccactactctcttcagagctatcagacagggacgtttaagtctgcagaagtttctgctaccttttgttcagctattctctggccccagaggtggagtccacagaggcaggccggcctccttgagctggggtgggctccacccagttccagcttcctggccactttgtttacaatctcaagcctcaggaatggcagacacccctcccccagcctcactgccaccttgcagtttgatctcagactgctgtgctagcagtgagcaaggctccatgggcttgggaccctctgagccaggaatgggatataatctcctggtatgccatttgctaagactgttggaaaagcgcagtattacagtggtagtgtcccaattttccaggtaccatctgtcatggcttcccttggctagtaaagggaattccctgaccccttgcacttcccgggtgagacaatgacctgccctgcttcgcctcacgctccatggactgcacccactgtccaacaagccccagtgagatgaacctggtacctcagttggaaatgcagaaatcacccgtcttctgtgttgctcacgctgggagctgtagactggagctgttcctattcagccatcttggaaccagaccacggatggcaaatttttaaaagttggtttttaggcaaatgtaactcataatgccaagtacactatagttacagtcactctttccccatctggtacagagattgatttaaggaggtgataaatgaatggagaaaatgtcactgaacagcagaactgagactgggatgaggcaagccagcaccccagcacctaagtcttaggaaggtactcacaaggcctgtacctacaggagcctacagaagtaaatgcctccttcattttttttttaattcttgccagcaggaagccacttcatttgtttttattgtggcaaaaacacaaaacacatatccaccatttcaactattttatagtatgcaattgaatgcattagtttattacaattttatgcaaccatcaccactatctagttctgtaacacgtttacctccctcaatgaaaacttcacatccactactaagcagttacttctcatttctcccttcctcaagccctggcaatgactgtctgtttctgggagtttgcctcgtctggatatttcatatatatatatatatatatatggaatcataaaaaatatgtagctgttccacatttttttttttgaaatggagtttcgctcttgtcacccaggctggagtgcaatggtgcgatctcagctcactgcaacctctgcctcccagattccagtgattctcctgcctcagcctcccaagtagctggaactacaggtgcacaccaccacgcctggcaaattttttgtatttttagtagcgatggggttttaccacattggccaggctggtctcaaactcctgacctcaggtgatccacctgcctcagcctcccaaaatggtaggattacaggcataagccactgtgcctggcctctaccacattttttatccattcatcaactgatggacatttggatttcttcacttttggctattataaatagtgctgccatgaaaattcacatacaagattttcttaaacatctgttttcaattcttttgaatctatatctaggagtggaattgatgggcaatatggcaactctaagtttgactttttgaggaacttccagactgttttccacagtggttgcaccagtttacattcctaccagcagtattgagggttccaatctctccacatcctcaccaacacttgttatgtttcattttttaattcttgccatgctagtacatgtgaaatggtatctcactgtggttttgatttgcattccccagaaggctaatgaccttgagcatcttttcatgtgcttcttggccatttgtccctccttgaattttgtatcctatgcacttcactcacgtcagcctaatcccaggcctgctctccagcacctgacatcaaacgcaatgtcttacaaccatggtagagtgaaatagtagagaccacttcctctaagtcacatagttatgggttcaaataacacttttaccaaatatgtgaccttaggcgagtaatttccctcttctaagcctgtttcctcctctgtaaaatgaatgggtacaataatagtacttcatggagttgctggaggattataagaaacgatgcagagatagtattttatacagtccctggcatgtagtaaatactcgagaaacattagctgtcattttgctaatgggaattcgctaagcatttgttgaatgagtgactgggccaacaggctgttatgaaatcaccaaaaggatcattgccaaaaagctcaacctccatttagcttatgggagagtggatctcatttaccacagggtgtaatatgtatgttgaatataagatgtaattgctgaaacgaagatggaatctgtaaacctgttatctgcagagttatgattatgaatagttcatttacaaaaaactgtgtgtaactaaggagaatctcatgcccagctgagggaaataagctgtttgaaatctctttccctatagtcttccatgccaactcccacttgcaaatcccagcccagtttttatcacctggtctctgtcatcatgaaaattatggggatagctatgagattctaactgatgaaaagcgagaacatgcggagaatgaaataccagctgcttattattcttaccatgtaaacctcatctgtatgcacaaatatgattggtcacatactaagaggtagaagacaaaaggcccgggtatttggggggcttatagtacagtgggaagagtgagatgataaacagaaaaaggaattcctaatagaaaatggtaaagccaaagaaaaggtgcaagcaatgagtgctactggcatttgctgtatttctgcagttcagccagaccctcctttggagctggctgtggaagtaaaacagccagaagacagaaaaccctacctgtggattaaatggtctccacctaccctgattgacttaaaaactggttggttcacgctcctgtatgaaattcgattaaaacccgagaaagcagctgagtgggaggtgagtgatccatatgctttttgaaggaactatggcctttggcaaggataaagccctcacaactgaaaacaggtcattcctcctaattactgggtcactgtgttggcctccaatgcagttgtgacccacccagatgtgaaaagcccttttcccctctattgggattgatgggggctcatcttcacagctctcctcgggctagtttcttgtactgctcagacacttgaccaggtttccaacctgcctcccttagtacattttagatctagacccttgtaagagtacttaaatggcacaaggtgggagggggcagtctcagtatatcccgtccatagtcaatggctgtgtttttatttactttaaaatacctcaaccaggctgggtgcagtggatcacacctgttaatcccagcactttgggaggccgagacaggtggatcacctgaggtcaggagttcaagacatgcctggccaacaggaagaaaccccatctctactaaaagtacaaaaaaattagccaggtgtggtggcgggcacctgtaatcccagctcctcgggaggctgaagcaggagaatctcttgaacccaggaggcggaggtttcagtgagctgaaatcgcgccattgcactccagcctgggcaacaagaatgaaactccatttggaaaaaaaaaaaaggctgggctcaggggctcacacttgtaatcccagcactttgggaggcagaagcaggtggatcacttgaggtcaggagtttgagaccagcctgaccaacatggcaaaacccagtctctactgaagatacaaaaaacttagccaggcatggtggtgagtgcctgtgatcccagctactctgaaggctgaggcaggagaattgcttaaacctgggaggcagagatttcagtgggctgaggtcatgccattgtgctccagcctaggtgacaagagcgactccgtctcaaaaaataaataaataaaaataaaaataaaataaaatactttgacctaaagaaataatattaaattgcaggtggtacaatattccatctttacatactttagtatatgcctcttttaaaaaggcacatttccaaacatagccaaaataataggatcacacataggaaaattaaaattccttaatatcgtttaatacccagtccctagtttaattcctcccaatgtttccgaatatctttaacagctactttgtccaaaccagaatctgctcgtagaccacacattgtaactggtcgttatatccttcagtttcagtgtaatgaggagactgggccacttgtcccatagagtatcccaccttgtacctttctctgatcagttctttgtggggttatttagctaatttctctacgcctccatttcctgtaaccagacttgattagatgtaggttgaacaatttttaccaagaattggtaaattcagaggtgatattatgtactctatattgtatttaatcagatgtcaaaaactatctggttgacccaccataagtgatgctaaaactggcccctgaattgaggagatgacaaactgatcccttgattgtaaggtcatgtttaatttgtatactactactttaccatacatgaatgcccaattctctttcacctcatgtttttaacaccaatttattattgaatcagttatttcattagggtttaaaggctaacaattctttaattttgttattcttttttttttttttttttttttgagacggagtttcgctttgtcactcagctggagtgcaatggcacgatctcggctcactgaaacatccgcctcccaggttcaagcgattctccttcctcaccttcccaagtagctgggattacaggcatgtgccaccatgcctggctaattttgtatttttagtagagacagggtttctccatgttggtcaggctgatctcgaactcccaacctcaggtgatacgcctgcttcggcctcccaaagtgctgggattacaggcatgaggcaccatgcctggccaattttgttattctttctacatttattaagtagttgtttttcataaagtgggaaggaggcagaatatttgacttttctgaagtagagtcccaaatggagagatagaaaacctgctaaatttttgtgtgagcaattttaagagaaggaaaagatagggctaagacagtggagtagtgacagcagggaattctctgtatatgattgttcagcctaacttagtttattttttaggggaaaactctctttcttcacaacaaatgttagaattgacttctgttttccttattctaccttagatccattttgctgggcagcaaacagagtttaagattctcagcctacatccaggacagaaataccttgtccaggttcgctgcaaaccagaccatggatactggagtgcatggagtccagcgaccttcattcagatacctagtggtgagcgtcttggctcttttttgcttatgtccctaaatatgttttaaatggtatatttgcatataataactactaatagagaaaccattttgagccttagccagaacaatagaggtgggtttataatctttctgcccaatacgaagacattttgaaaagcagcattgcaccctggattactgtcaatggagaacaattttaggataaggctacagacatgggtctgatgccccaaggggcttgatgagcagttattatgctcccaccatcttccctattcccatcatttagaggatttggtcaaggtcatcctctagttcttccagaatttataaggcagtaccgtgtctcaaaggctcagtctctgccatggattacacttggcaccttgtctcttagtgaagacacaggatataagatagacagctccagcaaagcaccttaattcagtagcttgtgttctataagggaacaatccatcttgcatttttaaaatgctttacagcttacaaagcctgtaccttatttggtcctcccaaccctcccaggtattcagagaatatgattatcattaaaaattaaaagtgaagaaaccaaacctcagcaaagttaggagtcttttccaaaaccacacaggaaagtctagcttttctaacaacttgcctgaccaaagtatcgggctttcattggcttggcatgctggaaagggcactgaactgcaaatcaggcaggcatctagtccactcctgactcttgcttaacaaaagcacagggtctagaggcagaaagcctgagttcaaatcccagcctgcaacactatagttatgtggccattggtaaatctttctttgattcccagttttcttatcttttataacaaagcaatgtaggcaaagagtttaacaccattgatggcttttagtaagaacttaatgttagcttttattattattactgcaaacgaccatgtgaccttggatttcctctttaaggatcaattaaaaagaataatgaaaggatttttaaatttttagagtactataaaatatacgcaacatattaacatattaataatatttaaaagagaatagccctgtcattgatgatactttggattgctgttcaaatcaaaaaaatatatgaatggaggaaaacactcttgggtttaagagtttcattcattaggttggtttgtttttaatgatgctgtacgtgatcaaagctttctggctgtttgttttttagacttcaccatgaatgatacaaccgtgtggatctctgtggctgtcctttctgctgtcatctgtttgattattgtctgggcagtggctttgaagggctataggtacttcactgtctctcaacttttcctcccaatcatgatagtcaaggataatgacaaaaaaaaaaatacaaagatgatggaaacctgtagataatcctcattttagccattagatgtagtgtgtttgcccataaaaaaaatcttttatcagtgctataaaaagtagaaaaattgactcgtttcaggctgatgttctttctatgaaacagagattcctagttgtgaaacagtaaaaatctggcaagagtagctaaaatcaagagaagcaaatagtccagataatccactaacttcaaaatcagcctccttaattagctaaagttaattttaatataggcctctgtaattttattttcatcattgattgtttcatggagctgccaaaccaagtcctatctctatcacagtccctatagtggctattatactaacctttcaaaaattacaaagtcagaaatgagtcatttagccaatctcatgaattattttatagcatggtgacctgcatctttccgccagttcctgggccaaaaataaaaggatttgatgctcatctgttggaggtaagtacaggaggcaaaaaaatggagtgtgactcactgctctgtagtaattaactctacacactcacacacagtccccgtcagttcagcctggtagtttcagccagcctttttggactgtctctcctggtcagcatgtgtgttaacagaaagttgtgtgaaggatgagggtacttactttcacacactaaatgtcagagggcaaggagagaaagccaagaaaacatggaaacacatttattgatttatcagatctactcataagcatagagataaacattttatacaaataatcaatttagaaagagagtgaatattttgattaatgcaaaacagggacccaccaccaccccctcaatcatacattggtaaaagcttctacttgaatgttctttacataaagccatagtaacagaatatcccattgccattatctctcactttgggcactcagctgagaccagatcagtactgtggggccatctgtttgccaggacccatttgggctgattcaagagggaattaaataatgagtgttttgaatgaaaagagaggttagaacagttttaaatttttctccaaattgaaataaatagtttcagtttggcttttaagcttaacactgacatatataaaagcaactagctgtacattaaggcaaatacttgacccagctgctctgggtctgacagtgtaagaatagaagaattgagtcctggataatctggcttgtctgtgttcactttggttgcaaatatcgaagcagggactagagcccaggagtcccagctcctgacccagtgctcttcctccactatccagtgtagcattggcctgatagaaccagcatgaatgtctcagcaaactaaactagttactgtccagctcacaatttaacctgctagccacagagacttaacgataaaatagctacttttgtctcaaaaatatgtgttagtattcttaatgatattacctctaatcctcaaaagaaccctcccagatgggtagtattaatattattttctaccttttaaaaatggagaagctgaagttcagagagcagcttgtccaaagtcacataccctataataagtgataaagccaagacctaggtcagtacctgacccaagtcagaggataagaaaaaagaggccgggcgcggtggctcacgcctgtaatcccagcactttggaaggcagaggcgggcagatcacgaggtcaggagatcaagaccatcctggctaacatggtgaaaccctgtctctactaaaaatgtaaaaaattagccaggcgtggtggtgggcgcctgttgtcccagctactcgggaggctgaggcaggagaatggcgtgaacccgggaggcggagcttgcagtgatccgagatcatgccactgcactccagcctgggcaacagagcgagactccgtctcaaaaaaaaaaaaaaaaaaaagaggcaagagtgagaggaggaggcaggaggaaataggagggggaaaggaaggatagaagcagggagaataataggaagggcggaaatatggaatagggtgatgaagggggagaagagaaggagggagaggaagtagagtagaagaaaacagtagattaggaagagggaggagaagggaaggggaaataagaagaggaaggagagaaggaagatgaaccacagaaggaaaagacaagaatccacttactattgccagactctagaaagtgatagaggaagttagcaggccagcaaccacacctctgccagtgggccgcagtgtcagatgcatgcataagcactgtgggtttagaagtttcacaaaccttcattttatagttatctgtttattattgtatgtgtatatactacttgcccattaaactcatgattattattgcttggagagagactacgttaaatatcctgagttgactttaaaaaaaaaaatctgctgaatagtatccagaaggtgattctagatggcctggcacacaaatgtctgaagtttgagatcttcccacctgcttgtggcaatgaacagcaccacttagcagggatgctgatttggaatgttatgaagctaacagccatctcttcttgtgtctgtgttttaatagaagggcaagtctgaagaactactgagtgccttgggatgccaagactttcctcccacttctgactatgaggacttgctggtggagtatttagaagtagatgatagtgaggaccagcatctaatgtcagtccattcaaaagaacacccaagtcaaggtatgaaacccacatacctggatcctgacactgactcaggccgggggagctgtgacagcccttcccttttgtctgaaaagtgtgaggaaccccaggccaatccctccacattctatgatcctgaggtcattgagaagccagagaatcctgaaacaacccacacctgggacccccagtgcataagcatggaaggcaaaatcccctattttcatgctggtggatccaaatgttcaacatggcccttaccacagcccagccagcacaaccccagatcctcttaccacaatattactgatgtgtgtgagctggctgtgggccctgcaggtgcaccggccactctgttgaatgaagcaggtaaagatgctttaaaatcctctcaaaccattaagtctagagaagagggaaaggcaacccagcagagggaggtagaaagcttccattctgagactgaccaggatacgccctggctgctgccccaggagaaaaccccctttggctccgctaaacccttggattatgtggagattcacaaggtcaacaaagatggtgcattatcattgctaccaaaacagagagagaacagcggcaagcccaagaagcccgggactcctgagaacaataaggagtatgccaaggtgtccggggtcatggataacaacatcctggtgttggtgccagatccacatgctaaaaacgtggcttgctttgaagaatcagccaaagaggccccaccatcacttgaacagaatcaagctgagaaagccctggccaacttcactgcaacatcaagcaagtgcaggctccagctgggtggtttggattacctggatcccgcatgttttacacactcctttcactgatagcttgactaatggaatgattggttaaaatgtgatttttcttcaggtaacactacagagtacgtgaaatgctcaagaatgtagtcagactgacactactaaagctcccagctcctttcatgctccatttttaaccacttgcctctttctccagcagctgattccagaacaaatcattatgtttcctaactgtgatttgtagatttactttttgctgttagttataaaactatgtgttcaatgaaataaaagcacactgcttagtattcttgagggacaatgccaataggtatatcctctggaaaaggctttcatgatttggcatgggacagacggaaatgaaattgtcaaaattgtttaccatagaaagatgacaaaagaaaattttccacataggaaaatgccatgaaaattgcttttgaaaaacaactgcataacctttacactcctcgtccattttattaggattacccaaatataaccatttaaagaaagaatgcattccagaacaaattgtttacataagttcctataccttactgacacattgctgatatgcaagtaagaaataatgcctccaattttttcttaaaatagtttagatatgttaagcatggattttccccctaaattctactctaaagcttctataaaatatagtttggaaataaaaatgttcttacacaaggggcaaatgaatttcatgtgaatccctttaggatgttttcctccttcatttcagcatgatagataatttattatacaccttagtctttccttagttaaaaaaaaattccctaaagactaacttgaaaagaaaaccacagcaggatgctaatggaattactgccttactgtacatacaaattctactttaatataaacccataagtttaactgtatttttgaagactatttttctatgacttaggtaaaataaaagactattttctattttcccagtacagctgtttatgtattcagtgggtacagtattttctgctgcaaggttataatgtgtatttacagtacatagtagtatataaagttcccgtttgtggagtaaaatgccataccaacccaaagcccactgtgaaatatgaagtgaatgacaaaattcagttttcaacgcaatatagtatagtttatctgattcttttgatctccaggacactttaaacaactgctaccaccaccaccaacctagggatttaggattctccacagaccagaaattatttctcctttgagtttcaggctcctctgggactcctgttcatcaatgggtgaatcttcctaaagctaccataaaaagggagggcgacgatttctaacagctgtttaaaagagagaggttttgcttttgtgagaaatcttgggccacaaaaaaattttaagcaaagccaggagttagtgtctctctgaagtaaattcaattgcaaaatcttggcagaggcagaaatggctcatatcagaagtgtccaaataaaagttctgggaaactaggtatttgcttcccagagcaatgggaatagctccaaaggtcagagtaaggtaatgagaatctcccggtcaattccagtgccaggcttcctgaaagaagtcaaagcttggatcctcattttaaagggcgcatccatgactcatctagcagcccctctctatttttcccttcacttgatggtaaatccattctatatgtccatttactagctggacatagagaacttgagctcacctctgggagttaaatattccaccccaactatcccatattgatagcaactggactcagaggtccccctcctgtttgaaagtgaacacattgccaatgttttgagaatggcaaaagcaatagatacgaagctccatttttctaatatataaacaatatcatgtgagtaagggaagcgtgtgggaaagttgtccaagctcattcagtcccctaaatcctcgatactttaactgtctgagaaccaactgcataggcatcacctgggcagtgtttgaaaattccatttgcagaatcttaagcatcagaatctgcattttactaagatccccaaatgattcaattgcacactgaagtttgagaagcattgttctagacaaccatttccactaaaggttattttagttcatagtaacaatcctcttttggaaaggacagatcaagtctgtttgacttgcaatgaacaacactgcatgtaagcaggcaaaaaaagaaacatatcagtagtttaagattcacattatgctgaatcttatatgaattcacataaaagaatgacctgcaaaactacgcacaacttctgaaaggccaaggaatataatctaccttgagagacattaaccaaagacagtcaccctcaaagccaatgcagactaaatctttcctaacatagtctattctctaagaatagagaagatatgtatcagtcactcttatagtctgaaaacctaaacataaaagtaatctgcttttgacatataattttgtataatacgtatgaaaaaatgtgacagctaaggacttgaattaaatccctaaaaaacaattagccactcattaggccaagactttaattctatgatcaattagcactgtttatctgaattaagcttttttgtggtctaacaaaaagtttttttgtggtctatcaaggagacagctgttcaaatggaaggatacatgtggggcaggggggcggtgaagagacctagattctggtcctaactgctttgccttggagagattaattcccccctctaagcctcagtttcctctgaagatgttggaccagataacctctaaggtcctttgaaactgactccttgattccatgactcactgaatatttttctgcaaagataatcccaaccaatgccttctatcctaatctaacaaaaaattgctcttcatcatagaaatacaaagtaatcttcagtgatgtgctctttatactttgctttttaaaccgtccattccagttggtcttaatatattgcacaagtattttataagtgaaatgtgtacagaatcatattctaagattatgtgcaaatatatgtgtagaaagaggcatttaaaaaaagaggcaggagattgagaagagacatattgaatgaggcactaatctttagaaaaatgatcttttactgaatcaagccatgctcattccttgctgaatccaacagccccaaatctcttttcttatatttggctgttaatttttttccttgcaccatcctagattgttaacaaccattgcacagttggctcatgtatccttacactctgagttataataagttgtatttttataaacaaatacctaaatattcaagttttaaggcgcatggaaactgaatctaggcaacgggtgatttgtgtagcttacaacctgaacagcaagatgttccaattcattctaacagatgtgtataagcacaagttatatcagctgtgtcagatatttaacagatcctacatttattagctatataacagactctacattttcctaagtgcctaagaccaatcctggtagtcacttaagtacaaaagactcactttaactggcttggtctgaaggggtcaatcctttactgcctgtacaagatctgggcagttttgctctgtgtcttgtgatgacccagctgaatgtgaaaagcctatgagttattgagcaaccagaggtccctgcattccaagttgcagtttagctctggggaaactctggctttctctttcctcaagtgtccaccactgcccatcatttgcagaaagacttggccctgcctttagcaacttccctatctccttagagtagacaagaaagaaacagatttgtgcacattttacaaagtgccttcctctatttttttttaaagttttcattttgcaaggaaaaatgtattgattagaaagtaacatttgccttatagggattatatatatatatagatatagatatagatatgtatgaatggagagatgagaagaagccagaaagggcacaacaaaatggtctaagggccaaccagcaatgttcagtgaatgtttacgtattgtttaattgaatcaacacagagctgttgtgaatagtgtgacttactttgcctgataagaaattgaggctggctgtgatttggggataaacctgccaccctgtgatttgagactctccataccaaaacttattgatacatttttgaatgtcattggcttacatgcctaaacctgaagagaacaatgcatgcacattggaactttgtacacaaacagaaaaatataaatgactttgaattaccatcccaagcattgctaacgtagatgtgccattgacgaaagtctcatgtgttcttgagtgaacaaatttccttttcttcctttttggctcaagcacaataatgctgtcactgagacagtgactgagcactcaatgtccaagactaaatcacatcaccacgactaagtaggcactatgtcctgggatgagtcttttaaactctggccatcaggttccttacttgttaaataagtaggttggcctaaaaggtttctaagacctctcatgatctaggtaaaatccagggtttcaggtcagtgtccctggtgcagtgcaagaaagccttgctgacacacccttggcctgaagcagtgagcacatgagattgtgtgacaacgcttcagagaaaaacagagatctgttcctccaactcagattgatttaacatccttgcttctccttttccttcctggctttacatatttgtagggtttttactccttctccagagcctactattttcctaagagttagtagcaaccataggatccacaagaaatgaaattattcatcaacaatgactttggcactgcaaaagactgagtcaaaggttaaatcagtcacacagatatccaaggccaagttgaagatcacaagtatatcccatttagagatttgcatacttagagattaagcccatgttcattaattatttagttaattcaaaagccattaataaatccatgcccagcctacgcaacatagtaagacccagtctctacaaaaattttaaaaattagccagccatggtgacacgtacctgtagtcctagacacttgggaaggtgaagccagaggattgcttgagcccaggaggtcgaggctgcagtgaaccgtgattgtgtcactgcactccagcctgggtgagagagcaagaccttgtctcaataaataaacccaagttacttcgatgactagatactggaggtctgaaggagaagctttaaaaatacagattgattgcttcagagaaatcctatttataattatgatctgaacttattctatgattagcaaatatatcatctgaaaataaaacaggagttctctccccagacttttgtttttcaggatggtgagttttggtctgggaccctcatggcacccattttgataaaaggaaaaagatagtaaaacaggaaataggaagtttccagagatttgggcatctcaggattccatgaaatgctgagactaacccactaaatccaaattttattggctatggtaaatctaaatctgttcagtgttctgaacagattttatgagtttatgtctaagagtttatgtctaagagaggtacataattcacaaacactatcatgctggcagctgttttgtccacatcaattcccttgatttaatgctctgatttcaatttagaaagtactgagacatgtaaagtctcaaaataggaaaaacctatcctgtttataaggtgtggtcaataaatagaccacagataatcttagtctattaattaactctcagatcatcttagactattaattaacattctgcttgctgctgattaaaaagaaaaaaaccctaaaaccttcagcaactgaagtagtaatataaaaaataacctttaatagttatggtcaaattacgcttcacttggataaacctcaaaatgtagtctgagtttttttgtgcacacttcacaaatcctgggggaaaaatcttttttccacgttatctgaaaaactatatggcgaagataccgctgaaaaataatttgttttatgaaattcctgaaaagctaattttgaattttttaaagtaactacctcccttttgtgtcctaatgtccttccttcaaagctgcttatagtttagaaatgaaagatgtcatgtctcatgctttgactggttttcggtggcatatttgatgtatttgccaagtggcattactgactttacagtaactgttacattattttgtactatattgctttatgtggttcaaaaatagtatatgccatattgaaatatgtaatcctcatgttgtgaaactcatcatgtaatacaatgaaaatcattacttaataacttacaatttatccatatgtagtttcaatatgattgtgtctatgactgtaaaacaaactgaaaaaatatgtaatgtatttctgttgaaagcgtgaatgtactaattttttcctaatcttgtctagaagaaagattctatgtcattcattgtacagctgctctggggtgttacacatttaaagtacaatccaacagttgtttgaaagtcagcctctcggctttgtttcatgtgactgctgacacttctcaagtgttctttgcataatgaggctggattttgtgcttcatcgttcattttaaacaattgaaaagtctcatgtggaaaccaaagcaatctagaaccagcctgttgggtgactgtgtcttctgtaaagccatattgaagtgaagttatacataatagcataaggttccacattttcaaagctaccactacctctgcttttcctctttccctagaaaatgccaagcaaaattccccaacactaagtgagaaattagaagtaattgttttataattaagttgctgggttttttttttaacaccttctaattcatcactttgtagggttatgcaagagtttctgaataaccattcttacatgtttatattttataaaaaccggctgcaagaaagattcagaaagaatacttagtaagtcatcatatgaaaaaccaacaaaaccatagagtgcagattttttcctaactataagtcacctcatagttgtccaaagccatgataatgatatctcttacaaattgacttctgtaacccccctagaaataacccttttccttatttgattttagtcatcaaacatagtatgatatgggaaaagtcagccatttaccagaaattatcttattttgattttaaaaactcatttctatatgtagttattgtaatgtctatttttttagacttaaagatttatagaagactatagttatctgatttgttattttgcatttttcattctgtaaatctttgcttatggcacattgtgctctctgttttccatggttttattcatttatctcctcctattttgaggggacaacatgggtagttaaatctttgtcaatagtattggagataacactaactgctattatcataacatcttcatttttactgcatgccaaaaccaatgcctgccaaacaaaatcttagacatcccaatataatatgttagttatatttctattcacatcattattgaaaatacccagctcagtgcctggcttaataaatgtttaattcccttacctactcttgctctatttttttatttgaaatggagatgagcaaaataacacattcatggctgaagcaattttttggacatttcttgttaccaaaagatctataatcaggacattgtttatgtaagttggacaaaaaaaattcttcccctttatgtccacccttcctatgattgcaagacaaaatttccctcctttacctcatccctataacatgggaggctgagaaaaatgaggggagatggaaccagatacaaggagatccaataagagaagcttatttaaatattgtgaaataaaggaagaaccaaagcatttttttaagtggggaatccttttgaacagttattatttatccatattattaacaacatcttttctgacaaaatccatcagatgaagtgtaaatggataatcttttaatggatctaaacctagaaagtttcacttactgttcatgtccgtgttccagaattgtgaaatggtgtgtggttttgctttccaagttcttctctgcctcctcttaattctctaattccatgtcttacagaagaatgagaaatttctttcttacttgagtatcatgctctaaaaaacttggcttcagtcacagaaacgctggctctcctgtgcttatattgaagccaactgcctttaattcttgggccctcttatatttttaaggtgcaaaatttgaagtctcagtcaccagacacaggttctatacaattaatgatgagctggagaagtaatatgtagctaatttttcaaaagcattgaatatactttccggaaagaaaacagaaattaaatattgccacatcttgccagaatcccatctgacaccttaactttgtcaggtttcctacaacttgctaatcaagttttatacattctaaatctccccagtttctttggggctggaagatgcaacttccatttaatagaaactttgaaatcttggggtaagggagcagtggggggactagggagaaggataagaaatagaattattgaaaagcccccaccagggaccttcctggccagaatatgcagagtaattcctgctggcttcacctttgaaagtccctcgaaactatgcagatgaaactgagtctgtttttgatattgtcagatgtattctaccttggaagtcccaacacctaaactggaattcttgtatttacatctcctccactgtcccccacaccacccctcaattcctgctgcccctgctaatgttaagcatttttctcttgttatcatcaggttcacattaaaaacagatacttacaaactgacttgaagcacagatacttttacgaatgtgataaaatattttcttaagaaaaggaaagaggatgtgggtcaaataaaacaccgcatggatgttgattggtgaatactggtgtaagaaaagggagctcaggaatttttattactgtatttgtaaatgagtttgaaggaatttgtaaatgccactggtacatttttaaggtgacacatttgctccttataaagttattaaaaattacagggtaagcttaaatgacgtttgccagtagttttactttatataatcaatattgatattgttgctgaactatgtaactttatgatgcatttttcagtcccttttcagagcaaatgcttttgcaatggtagtaatgtttagtttaaattgacttaataaattattacctgagcaatggtttttggagggtctttatatatgtatgtgaaacatgcattacatgaaaaatttaacttgaaacaagttttttttctttgccacaacaaaatttattagaatagatttttttaaagaaggagggggaactgcattttaactccggaaataaagtatgcagacatatgcgaaaacatttatcttaggacactcacccatggcatttttttcaggcagaaatttttgtgctcatctttgaacacctctgagtttattttcctactaattctaaatcaaaactgaacacacatttccccagtctttattcatctgccagactcgagccttaaaaatgcaagcatgcttggaagcacccagaagtttcttggaacttctcctgggaacaacaaagaacaatcaaaaggagagtttccaaacctgagattcgatcaactttcccatgtttccaaacctgagatatgatcaactttcatttaacaagccacaaatctcaggaccaaagtttcacattttcttttgttcgtgttttcctgactggaattattcagtctttacttaaaaccagctgtgagttcatcatccatttgtgatcttttatttattgcataaaatatttcacaaatacttgaacatatatagaaaaacataacaaaggctcatttacccacatccaaatctttaaatattcatattttgccttgtctgttcctttctttaacaaagattcatttaatatcacagatgctgtatttacatccctcaacaaccaaattctctacctctctcttcagcagtaactacaatcctaaagttattacatatccttcccagctatttttaaaatgcattcacctcatatttatctatccctaaataatatgaccaattactttggtatttatgagttttgcataaaaaatagcagatatctttatgcactttgattttctttcattcggcattgggtttttgagatacaaatagctccagctgcttagttttatacatctatacaatctattaaactccctattcatcaacatttaattttcactgctttatgcatacaactgctgtggttgtatacacatatacagtttattaatctccctatttatctacatctaattttcactgctttatgcatatagctgctgtaattgtacatatacatataatttattaatctccctatttatcagcatttaattttcattgccataaatgacaaaagttgtgtgtataccactgctataattttacacatatatactatttattaatccccctatttagcaacatttgattttcactgccataaatgactatgcaatgagcattcctatgccagtctcactggaatatgtgcaaaagtttctccaaaatatacacctagaggtggaattgttgggtcatgtaaaatgcatatcttaatatttcctagatgctgacaaattgcttcctctccaaagcagttttactgatgtgtacccttgccatcagtgtagtatttccatttctcgtcatctttatcactacctgatgcagtcagatattttaatgtttgacaattcaatgagcataaaatgatgcattgttattttactttttatttccctgatgaatccatttgtatctgagtaactcatccttttcctgcttatcttttatgccatctttgtcatcttctgagtgtctacatatgcccaaatgttagtccaggcttttctggcccatttttctgtgtatctattcctgtcctggtgctccactgttttattaccatattttatacaaagtcttgttatctggtatattaattctcacaccaccatacccttcttcaaaattgttgtggccattcttggccatttactcatcatatgaattttcagatgagcctatcgggtctcctaaaaaattgtgttgggagctagattgaatttatgttttaatgccagaagttacatctttataatattgtgcctcctaatcttgaacatggtatatcatttcctttacattgggcttcaataaaactttacattattctttataaatgtttgcatatgttttattagattcatccctaggtaccctctcattacaacctccacctcccgtgtttaagtgattctcctgcctcagcctcccgagtagctaggattacaggcccacaccaccacacccagctaattttggcatttttagtagagacgaggttttgccatgttgtgcaggttggtctcaaattcctgacctcaggtgatccgccggcctcggcctcccaaagtgctgagattacaggcgtgagccaccatgcccagtcccactgatgttttaatactgatcttgcattctgtaaccttactgaactctaattaacattcttataatttgtaggttttcttggattttcaatttttacaacggtatcaccacaagctaacaacactgtttcttcttttccagtctttatacctcttatgtctctttcttgatctattttattgggcttccaggacagtgttaaatagaaacgtgttatgggcatcctttcttcttcctgactttagtgagaatgctatgaaaagttcactattacatataaggcatcatgtaggtgttgtagaggggaaaggaaagctgccattttgccctccgagggttcactaaaagtcactgacaaaagttgaattaataggagaaaaggcatacaaatttatttgattatagttttatgtgacatgggagccttcagaatgaagacccaaagatacagaggaaactgtccatttttatgcttagtttcaacaaagtacggacagccttgtaggaaaatgattggacctaatgccgacagactgagtgagaaaacctagcaaggcctgtctgtctagatttttcttagcctctctgtgtaggaatgcctctcaccattccttccttctgggtatggggcaggaccctctctggaaagggggtcttatgacctacagtcaaacaagataggtcaggttatctacagtcagtttttacacagaaagtctggtgtaaagttatagtaatatttttagactgtaaagctgactttggggcaagagggttccagtttccatgacctgccttggggaagtgagattccagtttctatggccaggctctggagagaatgagggaccagacaggagggcagcaggtcaaagagaactgctgctgggcccctacaatttttcagatacccttagttatgtgaaagatatgcctttatatttctagtttgctaacaattttttatcttaactgattttaaaacttctcaaatttttttctacatctattgatatgttcacatggcttttctctgttaattaatgtgtaacttattacagaaaattattttagagagtatattttaaggttaaagtacccttgcattcttgagatgaacctcacttatacatgaagtatttttgcaaacattattaggttcaatttgctaaacttttatttaggatttttgcattaatgaggttcatcttttttgctgcttaagatatcgtttttggaggtgatttataagtaagttaaaatcttctaggattaagtaagtttctatttattataattctatcagtttttgctttatatattttgaagctgtattattgggcgtatatagatttaaatgttcaatcctccaaataaattattcttttcattgttacatacaatcccctttatttataatggtcacgtttgtcttaaaacctattttttctgatactgatattgctaatttggattttcctgggagtggtaattctctggtaagtttcttttcattcctttacttcctaattgttctgtgtcattatgttttaggtgtgtcttttaaaaacagcataagctagattttgttttcttctggttgagaatattttccttttggtggctaaacagttctctccttctcatttgatgcacccttccttcatttttcttttgcaatttgaattatttaaatcagccaattctgtaataatcactatagtaacaggatataattaaaggtccttgtaattaaagatccttgtgagataattcactgtaactgagagccctaagcttgggaatagctcttcccccatacaggaacaatcccagtcatagtgaaccagactctaaggattctcatctcactgtgattgaaaacaataattaagccttgattgtaaagttcaagagaatgaacaactagaaaatcccaactgctgagagaagggcctatgctcaaaaagattttgccatacattttaccaaaaagagattgagttgtattttcaggatctcccatttaaacacaaatcttccccacataaattatctgtcaatcattctaccacatacattattgaataatacttgaacactgtatgccaggcactgtgccaggtatgcagttagcagtacggatgtgctctccagcctcttggggattacagtctagtgggaaggctaaggtaatccatgtgtccctagctttctccagaatgttacttcctaaaacacggtaagtccaataattccgatgagacatgttcaaagagtcctaataaataaacaaaaggactttgaccttgcattatttttcaagaaaatcagttttccatgaaattctaagggttacagtatctgagccgcatctttaagcagttattctcttcttacacatctgctaatctctgcacctcagtctgaacactctgcacacagcattcttcataatccattaactgtgaaatggaacacctgtaatatgaagtttcatgtaaattgtataaatttatctgaaatccttccaaaacaattttcctttccttcaatttcacaactcctaaattagttaagagagggaaagaattactttggaaaagctgttaattatcttcagagccttactggactctattattgacagaggcctggggcagagcaaagttcagttacactcaggacttaactgataaatcactggtgaacctgtgtgcaaaaatcctccccgataattactaacatgacaacagaatttccaagtttccccatttgtgaagtatttttttcaaggagaaatttctatattttcctacttgatgaaaggcttctcccctgctatttaccatttgtgcaaactgagatagttcttcatcttctctagtcttatgtaaaatggagaatattatacctgatctgctcaaaggagagagaagagagactcagcaggtgtcacttataagtcagaaataatatctgtttaattggagttttatctgtgaaggtagggtaggatcttggattgatattccaaatgactcctaggctgagaatgaagttctagaggcagtctaagtttcctcttcatcccagttttcagattttgtggacatcacgtaattcctcagagttcaaaagaacaaacatcttagaatatagttttgtccggccgggcgcagtggctcatgcctgtaatcccagcactttgggaggccaaggcgggcggatcacctgaggtcaggagttcgagaccagcctcaacatggagaaaccccgtctctattaaaaatacaaaattagctgggcatggagtagctgtaatcccagctacttgggaggctgaggcaggagaattgcttgaacctgggaggcggaggttgcggtgagccaagatcatgccattgcactccagcctgggcaacaagtgcgaaactctgtctcaaaaaaaaaaaaaaaaaaaaagaatgtagtttcgtgcaatgttagtttagttgaattataaattgatgtcatcttactgagatgcatttaaaatgtacacacattttgacctaggaatccttcttcaaggaacttatctgaagaaaaaaataattagtcaagtacagaaaattctctgtcctaggatgctagagaaaatacagctatccatcaaaaggaacttattaaacaaaaaatatgaagactttcagtttctgaaacagcatgtgtatacacagatagacacatgtagagaaagatttctgaaaggaaatttactgaaatataatggtcaggtttgttgtgatctttttctttcttctttatgcaattctaggcttgagtttgtttaacagaagtacatattatgttatggtaatccgaataatttattttctttttaaataaaagaggtataacctcccactttccctctagaagttattcagaatgtactgtttttcttccccactccaggtgaccccttgatgttgggtgcctctcattacaaaaatctcaaatcttacagaccaagaaaaatctcaagtcaaggaagacttgcggtgttcacaaaggcaacattgaccacagtccagtagagctgaagagcatataccagaattcaggaactcaacattttctcccctctgtccaaccacaggacagactgtgcaccccagggagatgctgtgtgtccactggcctcactgacttggattactcctgcagcacgtgaccagccagctcatatgatcactccctactgcccccaaagcagaattgactgggagctggaaacccacacaaaaagggacaattatattgaatgtaacatactccctctgcttacctagtgccttcacctcctatgggcatttggagtaaaaggttgttatgcaggtgtttgtgaaggatgtggccaagtcagttgtctcccttacagggtgacccaagattaatgatatctacccatccccagtccctcgaccccctagttgcaatcagctttgtcactgtcccccttaggcactgccatgtaaagcacgtggtcccccattctgaagcagtgggaaacctagaagagatgtactcttcgcaacctggttggatcttaaaaacatggttctaac
